United States Patent Application Publication US 2025/0325599 A1 - sequence listing, part 7

SEQ ID NO: 4 - DNA, 4204171 bp, Clostridium difficile (residues 1-2,102,086 of 4,204,171)
  source 1..4204171: mol_type = genomic DNA
tccagaaagactatctggttgataggtcgaaggtgtaagtgcagcaatgtatttagcttatcgatactaataggtcgaggacttgaccaatatttatttgatgttcattcattaagatatatgtgtagtttttagagtgctaactctaaagaaactagtattactaggttctataaacttattaaaaacttaatagaaatattaagcataaagattatgtggttacaatagcagagaggatacacctgttcccattccgaacacagaagttaagctctctagcgctgatggtacttggtgggaaactgcctgggagagtaggacgtagccacgtaatctttttttatttattaagtttcttattttaaggtactatttttaaagtatgttataaatgctttgtgtaaatacatataatagtttaaagagattgattctttaaatatagggtgagaatccttagaatatgtacccttaaaacctttaaataagaaaggagatagataagtaagtgtctgtaatcaatagttttattttacaatatggattaatctctgtatttgtattaattatgattgagtatgcttgttttccattacctagcgaagttgttttacctttatgtggagcaattgctgcaagaaatcattttggatttctgacaattttaattttaagtataattgcaggtatacttggttcgatattttgttatacagtgggaaattggggaggtaaatctatcataaataaaataatagagatatgtccaaaggcaaagaaaggaatatttgcatctcaagattattttaataaatactcttctatttctgtttgtgtatgtagattaatccctttatgtagaacatacatatcttttatagcaggtatagcaggtcaaaatattataacttttgtaatatcatctatcgtgggaataaccatatggaatacttcattaatcagtataggatatattttttctgagagttgggtaagaataatgtcacattataatgattataaattcctcgttctaattataccaatatccataatttttattggatttgttattaagtcatttatacataaaaaacatcacaagataagattataaaaaatattagaaaaatttcttttgtacaaggtcattaagacggttgagaaaatagaaggcgtcgtaaatctgcataagcactacgtttttgtaggttctcggcgtttcttttattgcttgtgtctgtggtacttttttcttaaaatgtaccatgttttacactttgttgaggataagtttgcttatatagaagaaaaggcggcagctttgaaaatcaaaactaccactttataaatattcaaaaatatgttgcctctgtgacagtttttttatattcgttcggaagattaaaaccaaatatttaaagttatagtattaaaatacgaaacaataacttgctaatattacattcactataattaacataagttactaatccagtccaatcttatcagtccactcatttattctttctattacccctttaggtgggtcattgttgaatttccattcagtataacagtgtaacatgccaaaaagaaacaagaatacaattagaataatcagtttttttatctttttcattttgatatacctatttcaatttttttcattgtgttttagccctttcagtataaatgcagaaaggcaggcacaaagtaataaacttatgatactccccataattttttctccagtagttatatagtatccagaaatattaaatattgctgcaataggaaaaaaggtttgtaagacatttgacatacccgcaaatagtccagcaatagaataaacttctgtgaatactaatgcaagccaatatccttttttcatgcgcgataccaaggcaataatgggagaaattgcaaagaatacacctatgccatcaagaaaatactctttcatgcaacttaaaaccagttttgtcgataaatcggaaaaatgtaaaacggattcagtcaaaaatgttatagtaaagagtaacaaataaagaagtatactgaatataaaagtaataatcatttttgctatggttaattttgtttcatttatgggaataagacgcagggatttaatagtgtcctcctcttcttcacgacaaataatatagcttcctaatagggcaatgacagcaggaagaacaaaaaaagttgaccaaggttgtaccgcgtccatataccaacctgcattgtctatataccgtgaaccgtcataaacgctctttaagccataatgtaaatctgggtcattatatacatcctgccctcctgcaaaaactatgactgctatcataatggatgcaaaaaatgtaatccaaacaatttttgaacgacgaattttttgacattcagcccaaagtaatttccacattatctacacctcactttcttcttcctagtgcaatgcttgcaaacaatactgatacaatactccaaatacaaatacaaagaaatgctaatgggacattaatttcctgtgaaaatataagacctggaatgtctttatttctcatgataataactcccatactggataatgggtgtaaatacatatttattgtcattataacaaaaccggaaaaggcatataccaatgtgatacaaattgggagaatgtatcctttttgagatgtagcgattgccaaaatcggcaacattacaaaagcagtgattacaccaatttctaaacattttttcaacaaatataaaatgcttgcccagctaaatacgacatatccagaaagtacactaaataacacagaagcaacggctgtaatcagcataaaacaaatagagtaaatcaaaacaacgaaaaatttactaaaaaagtatcccattttactaataggtacaatccaaagctgtttgagcatatcatactggttttcttcgtgtataagcatggtgcaaaatatacccaaaacaacgggcaaaataatccaaagtgtataaccaaatgcagaccatttataaaactttgttggctcaacacctgttttaccaaaataattgaagtatagtagtgcgaaaaacggcataatgagagcagacaacaacatcagccaaataagtttcctacgacgcagtttaagaaattctgtttgaataagtttaagcaatgccctctcctcctgtgatttttttaaagtagtcctctaaagtatcattacaaagttgagaactaataacagttacattctgcattacaagtgctttattgatttcacccatatccagagtagtgttataaaggcgtaaagtgtggtcatcttgaacggaataatccttcgtgttaaattgacgctctaaaataagtgatgtctttggaatatctgaaacttgtagcaggatatatttactgtttttcttttctagttcactcatactactttcttccaaaagaacaccgtggtcgataattccaatatcatcagccaacaatgagatttctgaaagaatatgactggagataagaattgtctttccatgctcaacgctcaagtccctaataaactttctcatctccgcaataccaatagggtcaagtccattggttggctcatctaaaactaacagttccgggtcatgcaggatagcgttggcaataccaagtcgctgtttcatgccaagtgaatatttactaaacagctttttatttttataaggtaagcctacaatctccaatgctctttttacagaattaggggcggctgtaccacgaagttttgcaaaaatctccaagttctccgttcctgtcagattaggataaaatcctggcgtttcgataattgcaccgatacggggatatactcgtttttcacatcccttaatattctctccaaatacatctacctcgccatacgtgattgaagtcaatcctaaaatcattttcataattgtggttttcccagctccgttgcgtcctaacagaccatatattcggcctttttttacatggagattgactttgtcaactactgtttgattcccataaatttttgtaagttgctttgtttcaatcacaaaatcattcatatataatttcctcacttttaataaatttgtttctacaaaagatagttgatacaacgtcaaaatcaactacaattagaattataaaacatgaaccttgccaaaaccttgccataatcttgcttttatcttgttttagagtaagaaagcctcgtacttttacagggctttaggaagcaatattgtaaattctgttcccataccgggagtgctgttggcggtaatatttcccttatgagcgttaataagttcctttgcaatcgccaagcctaaaccatttccctttgaagctcgtgaatggtcgcattggtacaacctttcaaaaatatgtgggagattgtctgaagatatacctttcccattatctgttattataatttgagcttgctctttgttttcaaaaattctcaatgtcattttgttgccactactatgggtaataatattttgtaataggttattaatgatacgggtatatgcatttgcgtctatacgtaagaagtactctatttctggtatatcaaattcatattcaaaatgactgctttctaaaacaggtatccaatcagatataatattacgggataattcattcaagtcaaaaatatcaaaatgaaaaacttgttccttagaatccaattttacccattcaaatagattttctacaaaattctttaagtaatgagccttattagacgcaacatggatatactcgtctttttcctctcctacaacaattttactttctactgcttccaaataaccgaccaaagaagcaagtggagtttttacatcatgggagagacttgtcattagctgtttgtaggcttgttctgattgtttttgctgaataagttgaaattggctattgattgctatttcgttaatatcatagcaaatttgttttgtaatgtcgttttcatctgttaaaatacggcgattaaggtttccattttttatatcctctaaagcatcttttataagtgtaagttgtattcggacacgtagcaggacagaaacaaggtacgctataataatcaggctaagagccaatatcaaaagtagatagacacttgtattcatgttaagcctccttattaaaacgataaccgacaccacgaactgtcaaaatataaaatggatggttggggtctggttcaatcttttttctcaatttactgatgaaagacatgatgttactatcgtcaaaagcatattcttcttcccatacttgtgtataaatctgttttttggtaaatacccgtcccttattagaagccagaaaagcaagtaaatcaaattctttgcttgtaagttgaacaggaatattattgatagaaacaattcggtttgtcttgtcaataatcatgccatttattattatgcaatctgtgtctgttataaaagcagggtttaacatagtataccgacgaataagagaattgacacgagccataagttcgtttatgctgaacggttttgttaggtaatcgtcagcacctaaacgtagtccggaaactttatcatcctcgtcatttttagcagtaagcataattactggaatattacttgtttctctaatttttttcagaacttgaaaaccgtctatatctggcatcattatgtctaaaattacaagagagagtgtgtgtctatttttatcgagcaaatgtagaccttctgcaccacaatgtgcagtaatagcagataaattttcttgctcaacacattttttcataagagcacaaagttctttgtcatcatctataatcaaaacgctattcatattgtacttcctttcttcttttcgctctaccatcaacaggcttttctgcgttctttggtatcagccacatatacccgagttttgaaactcctggtatgcgactttcttcacatagtttttgtactcttctttcagaaatgccccatttttttgctacttctgggcaagacatatattccatatttcaatcatcctttcctcataatttatcagcatatattatatacgtatagacgaacaaaatcaagaaatatcagtaagtagtactcttaattttgtagtgataaaatggtgcatggttttacttaaaatgggggagattaaaaaatcaattttagcttatatccttttatgctaaaatggtgataagaaatgaaacaaatactatttatataaaaggggtaaaaatatggatataatagataatctaagggtgcaaggggtagatgaaaaacttattgaagatgtactgtattttagaaattattatggtttagaaaaagatttagaatacagagtaacaaagtctaaaacttatttttatggtaaagatatcttgtctatgtgtatagcagctattttagaagaagaaaatatattattatcgggaccaaaggcaacgggaaaaaatttacttgctgataatctaggggaaatatttaatagacctcagtggaatacatcatttcatataaatacagacagttcaacacttataggtacagatacatttatagacaatgaagttaaacttagaagaggctcagtttatgagtgtgctattaatggaggttttggagtatttgatgaaattaatatggcaaaaaatgatgctatagttgtggtacattcagctttagactatagaagaataattgatgtacctgggtatgagagagtcaatctacatccagcaacaagatttattgggactatgaattatgaatatgcaggaacaaaagaacttaatgaagcactggtatctagatttatggtaatagatattcctcctatagaagaagataagttaatgatgattttaaaaaatgaattttcagatgctgatgaagaaaaattaatacactttgcaggaatatttttagatttacaattgaagtctcaaaatggagagatatctagtaaagctattgatttacgtggtcttatggcatctcttaagactataagaagaggattaaaaccaactcttgcaattaatatgggacttacaggaaagacttttgatgtatatgagaaagaaatggttggagatgtaattaaaactagaatacctaataaatgggagagtatagatgtatttccaataagtcatatttaatataggtgagattatgaaatggatatatgatgattatgaatttgaaaatagagctaataacttatcatggacaatagctggtgattacaatgaaagtatagatatatcagaaaaagattactcttcaaaagaaataggtctatattttgcaataattgcaggtgctagaagaaagtatgtagattgggatatagttaaaaaatatcttacaaatagaataagaaaaggatacaacaaagatattatactgggtctaattcaagttatattaaatacaatagttgaagaaaaggtcattaaagataggccagggatagaagacataagaagaaatgcttataaagatattgtttcacgttttaccaaaatacacaatgataatattatggataaaattaaatacacatttgtactttataatatggacaagcacccagcattagatagtatgactagaagaatagttaatgatataagaaatatagataccaatcaagatatgatggagattttaaaagcattagatgttatatatttaacttatttcgaatacatattaaatggagaagaaaatagtcttattgatgaaaataatgtagaaagtgtagaagtaaattttgatacatttgctgatttcatgtatgaagaactttatagtgatgaagaagaaaatattattgaaagtgatatagattcaatatcttcatccatgcttgtagaaggtgtaggggattttgatgattctaaatgtagcaattcagcagaccgagttatatatgttgatgaagacactgcaaataagatatattcaaaaatagaacattattatggaaaaacttatttgagtaaaggtgaaattaaaaaaattgagacacaaaattgtagaaatgttcatgaaggttgtagaatacactttacagatggagttcttagaagtgagtgtaataatgtatttcaactaaaatatgtaacaagacaaaaagaaaataatttaggaaaatttagagaacatgctagaatgtatagacagcaaataaagagattaaaagaaagtctgtcaagaattttaatagaagaaaatgctaaaagtagagtatattctgattgtggtactatattagcaaatagagcttggagagttggtagaagtaataataataaaatattttataaagatatagaaaatgaaaaagggaaatacgttattgatatattattggatgcaagtggctctcaaagtagaaatcagggaaatgtggcaattcaagcttacataattgcaaatgctctaacagaagttggcataccaaatagagtgatgggattttctagttttttagactatacaatattaaaaagatttaaagattatgatgatagtataaaaaatagtgaaaatatatttgaatatttttgtgctggtaataatagagatggtttggcaataaaatctatatgtagtggtctaataaatagagatgaagaaaataaaatcctgatagttctcagcgatggaagaccaaatgatgtaaagataggaaaaagtagtgagagaacattaagaggagaaaaggcttataggggtatagttggtttgagagatacagccaatgaagtgagaaaagctagaaagcaaaatatattagtactaggagtatttacaggaaaagaatcagaacttgaagctgaaagattaatatatggaaatgattttatatattcaagagatataactagattttctgatgtagtttcaatgtatttaaagaagataattagaaattaataaacttacaaaaaagaatttatatacataaaaatataaaaatgaataaaatttataaaaaatgtagaaattttcacagaaaaggtatacaatgatttatatagaaaatgatttaagaataatttaaaaattaaatatataatattataggttctttaagcaagattaatagggaaaaaggttaaattcctttacagcccccgctactgtgatgcagacgaaacttttgttagccactatgatgatattttttatatctcatgggaaggaagaggagtaggaagaagctaagtcaggagacctgcctaaaatattaaagtaatttcttcggggatggagaaagtttcttataataattatacagatatgttcattttatgtgtttgtatttggattatcgaaaattagaagcctagccatcgagttaggcttttttatttttatttttaaaataaatcagacatatattatttatattttaattattagaaagggagagaggggatagtaaaatgaaacaaaatatcaaattaggggttatagctgcacttatgttaatcgttttaactccagttacatcgaatgcaatgcacataatggaaggatacttaccagtaaaatggtctatagcatggggagttatatttataccattttttttagtaggactaaaatcaataggaaaaatagtaaagcaagaccctaaaaagaaagtattattagcgctgtgtggagcatttgtatttgtattgtcagcactaaagataccttcagtaacaggaagttgttcacatcctactggagtaggtcttggagcaataatgtttggaccaagtgtaatgtttgttcttggaactatagttctaatattccaagcattactattggcacatggaggaataactactttaggagctaatgctttttcaatggctattataggaccaattatatcattcttaatatttaaagcattaaagaaaaaagacggaaataatgcaatgccagtatttcttgcagcagcaataggagatttggctacatatacagtaacttcgatacagttagcactggctttcccagacccatcaggtggagtgatggcttcagcaattaagtttttaggaattttctttatgactcaaataccaatagcaatagcagagggtattcttactgtaattgtatataatttaattacagaaaatggagaaaaaagcatactagaaaataatgataaaggagttaaagctaatgagtgctaaaacaaagacgaaaactaatatattactacttttattagtagtagctcttatcatattcccattacttgttaattcgggagctgaatatggaggagcagatggtcaagctgagagtgaaattactaagataaatccagattatgaaccatggtttagtagcccatatgagccaccaagtggagaaatagaaagtttattattctctgcacaagcagcgttaggtgctggtgtaatagggtacatattaggtgttcaaaaaggaaagagaagttaattatgcttataattgataaatatgcatatacaaatagattaagtaaagtaaatccaaataaaaaagtagccataggagtaatctttctgattgcttctatggtaataaaaaatatatttgttttaagtggaattatgattttaatgagtattctagttgtttgtgtagctggaatagatttaaagaattatttaaaattactcagaataccaatgtactttttatttcttagtataggaataactcttgtaaatatatcttttaataaggcagacttattatatagttttgaaatttttagtttcaatgtaggaatatcaaaagcatctattgacatgtctattcatgtgttatttagagctatgtcttgtttgacttgtgtatacttttgtatacttacaacaccttttaatcaattaatattcttctttaaaaaaatgcatttgcctgatacttttgttgagctatcaatgttaatatataggtttatattcatatttttagaagaattttcagaaatatataagtcacaagaactaagatttgggtacataaatttaaaaacttcatataaatcattaggaattcttggcagtatgctgtacaaaagacttatgacaaggtatgatgatatgtgtatatcattagacataaaattgtatgatggtaaatttcacatagtaggggataatgatgtttaaaataaataatttaacttatcaatatgaaaagaataccaatgcactattaaatattaatatggatttttcaaagggaaatgttataggtataataggttcaaatggttcaggaaaatcaacattatttatgaatttaatgggtatattaaagcctacatctggagaaattctttttaaagaagaaaagttaaaatatgataagagaagtttatacaaccttagaaaaaatgtaggtattgtgttccaagacccagaaaaacaaattttttattcaaaagtatatgatgatatagcctttgcaatgagaaatattggtatagatgaaaaaataattaaagagagaataaacaaagctctagtagctgttaatggaatagattttatagatagaccagtacattttttaagttatggtcagaaaaaaagggtagcgatagcatcagttatagcaatggaaaatgaaattatattgcttgatgagcctacagctggtttagacccagtaagtactaggtctattgtagatataataaagggattgaataaagataatataaaaatagtaatatccagtcatgatatgaatttaatgtatgaaatatgcgattatatatatgtattggataaggggattttaattgatgaaggaaaggcagaaaatgtatttgtaaatgaaaataacattatacaagctggcctagaatccccatggttagtaaaagtacatagaaatatgaatttacccttatttaagaaagaagaagatttgtataagtattggaaggaaagagaacttaatacaaataaataattaagccctaaacctattttaaaaaaatagatttatatataataacccttaacctagaccccttaaaggtgccttatgattccccaaatcataaggttattttttttattaaacaattaaataaattatatggaaaaatgttatttaattgtaatatattggaaataatctattaatataatacataattataatttgaagtaattcatattttagattaaaatatatttatggctgttaacaggaggagaaatatgaatttagatacattaaatcctgctcaaagagaagcagtagaaaagactgaaggtccagtacttatactggctggtgctggttcaggtaaaactaaggtattaacaacaagaatagcatatcttatagaagataaaggtgtacaagcaccaaatatattagctataacatttacaaacaaagctgcaaatgaaatgagagagagagttgaacaaaatataggtcctgaaactaaggatatgtggataagtacattccattcttgctgtgttcgtatactaagaaaagatataaataagattggttacaatagaagttttgtaatttatgattcagcagaccaagttacattggttaaagactgtctaaaagaattaaatttaagtgataaagtgtttgaaccaaaagcagttataagtgcaatttcaggagcaaaagacaaactttatactccaaagcagtttaaagatatcaacatggcagataatagaatggttaagattgcagatatttatgcgttatatcaagaccgtttaaaaagaaatagtgcacttgactttgatgatttaatacttaaaactgtagaacttttcaaggctaatgatgaagtattagcatattacagaagtagatttagatacataatggtagatgagtaccaagatacaagtaaagctcaatatgaattgataaaattattagcaagagaacatcaaaatatttgtgttgttggagatgatgaccaaagtatttatggatggagaggcgcagatataagaaacatacttgaatttgagaaagattatgacaatgtacatgttgtaaagttagaacaaaattataggtctacacaagtgatattagatgcagctaataaagttatatctaataatatagaaagaaaaagaaaaaagctttggagtgaaaaaaaagaaggagaacttataaagatacaattaactggtagcgaaatagaagaggctgatttcattgctgattcaattgcacaaatagctagaaaagaaaatagaccttataaggattttgcagtactttatagagcaaatgcacaggcaagacctgtagaggacgctttaaatagaagtcaaattccatacaatatatatggtggtacaaaattctacgagagaaaagaaataaaggatttgttggcgtatttaagagttattcaaaatccacaagatgatatatctataaaaaggattataaatgttcctagaagaggtatagggcttagaactatagaaaaaattgaagatagagctaacttaaaacaggaaagtatatactcagtattaattgatatagaaacaaattcagatatatctactaaggcaagggcaagtataagtggatttgttgatattatagggactcttagaactataaaagaagtttatcctgttagcaaacttatagaaaaagtcttggatactacaggatatatggacgagcttgtagagataagaaataaaaatgaaaaagatttaacaggcaaaggtgaagaagctcaagacagaattgataatttgagagaatttatttctatagctttggagtttgaaagtagtaatgatgatacttatgaaaataaagacttagagacattcctaacaagtatagcacttacatctgaatcaaatgatgaagaagacaatgatagggtttcgcttatgacaattcatacatccaaaggtttagagttccctgttgtgtttttaacaggtatggaagaagggttatttcctatatcaagagctataaaatctatgagtgattcacaaatagaagaagagagaagactttgttatgttggtataactagagctaaagaagagctatatatgtcattgacagagaagagaacattatatggtaaaacaaatgttgcaatagcttcaagatttatggaagaactgccagaagaatgtatagaaagattgtacaaagtaaaaaaagaactaagctattctaaagcaagttataatatgttagataaatatactaaaaagtatatgagtactataagcaaatctaaagttgcagataaagttaatgctacaataaaagattctaataaagaaactaatccagatgatataaaacttggttctaaggtacatcatcctaaatttggggttgggacagtggtttctataattggtacagatgttactatagcttttgaccaacagggaattaaaaaaataaataaagaatatacaacactaaatattttataatggaggtaaatgaggaatggatagtataaactttgctaaaaacttaatagacttcatatatgatagtccgtcgtcttttcatgcagtcgagagtactaaggaaatcttagataaaaatggatttgaagaattagttttgaatcaaagatggaatctaagagttggtggaaagtattatgttactaagaatctatcagctatagtagcttttgtagtaaattcagaagatatagaaagagatggatttagaataataggctctcattcagattctcctacatttagtattaaaccaaatgcagaaatagaagctgaaaaatcttatttgaagttaaatacagaatgctatggaggagcaatattaagtacatggttggatagacctcttgggatagctggtagagtagttttaaaaggtgatagtatattaaaaccaaatgaaaggcttatagactttaaaaagccaatttgtataataccaaatctagcaatacatttaaatagaagtataaatgatggtcattcatataataagcaaaaagatatgttacctttagttgggatgttaaatgatacattagaaaaagataattttcttataaagcaaatagcatctaacttagatgtaaatatggaagatattatagattttgatttatttttatatgaatttgaaaaaggaagtttaataggggctaatgatgaatttatatctattgggagacaagataatcttgcaatggtacatgctagtttgaatgctcttgttaatactaaaggtcaacaaggtgtaaatgtaatggctgtatttgacaatgaagaagttggtagctctactaaacaaggtgcagattcaaacatgttgttaaatatattggagagaatttgcatatcaatgggtaaggatagagagggattctttgagtctatttattcatcttttatgatatcatcagatttagctcatgctattcatccaaacattccagaaaagcatgacccaactaataaaccaataatgggaaaaggtccagttataaagataaatgctagtcaggcatatactagtgatggatattctatagctatttataaaaatatatgtagagaagttaatgttgagtatcaagaatttgttaataggtcagatgaaagaggaggaagtactataggtccaatatcttctactcatatagatataccatctgtggatgtgggaagtccaattttagcaatgcactctataagagaattaggaaatgttgaggaccactatagtatatataaaacatttagtaagttttttgaaatataaatataagataaacaatttggagatgagactatgaaattaggattatgtttagaaggtggaggagcaaaaggggcttatcaagcaggagtagttaaagccttgtatgatggaggaataaataaattttattcgatttcagggacatcaataggagcaataaatggatattatttgtacacagggaatgttgataacttggagaaaatgtggacaaatataaaagatatccagaatggaaatgtaaaaatagtaaataatactgtggataattctcctgctatagacaacctaagggaactagatgatagtaatatagaagaaatgaacttttatgttaattatgttgaagttgataataaagtagtatcagaaaagattgttgacatatcaaaaatgcctcgtaatgaagccattatcagcatttcatacagtgggttgttaccatcaaatccaaacgcaactcttggatttaaagaacaatttgtgaaagatgtgcaagaaggaatttatgatggtttcaaattagatggaggtttaattaggagtgcattaattgaaccattaattggggataatgtggataaaattattttaatatccacaaaatataattatgagttgccagaggatattaaaaaagtatatgatgaagataaaataatagtagttagacctaatactcaatttgctcctaaagatacgcttaactttgatgatgagttttgtaaaactatttatcaagaaggatacgaaataggaaaaaatatacttgatagactttaatttagagtataatataataaatgtaattatgtaatttaactaatgaaaaggaaggtaataaattatggaaaataaaaatcctatagtaactatagaaatggaaaatggaaaagaaatcaaaattgagttatatccaaatatagctccaaatacagttaaaaactttgtatcattagtaaatgaaggatattacaatggaataatatttcatagagtaataccaggatttatgatacaaggaggatgcccaaatggtacaggaatgggtggcccaggtcactcaataaaaggtgaatttagtggtaatggatttactaacaatttaaaacatgaaagaggagtcatatcaatggctagaactatggcacctaattcagctggttctcaatttttcataatgcataaaaactcaccacacttagatggtcagtatgcaggttttggtagagtgatagaaggtatggatacagttgatgaaatagcatcagttagaacagattcagctgataagccacaaactccacaaattatgaagtctgttactgtagaaacttttggaatagattactcagatgtagaaaaaaactaaaacttatataaaaactagattgagttataaataaaaattaaaaatatatattacttaaaaatgaggataaagtgaaatgttattatgtttttagacaaatacatttcactttttaatttatttgtattgtggaaagctatatattgtatgattttaactaaaaaataaagttttattaaaaaaattttattatgattgtttatatatttatttttaaataataatgtattaaataaatatataaaatatgtggaaaacacttatttcagtattttttaaacttattttatttattctatttaataaaaataaggttttttataatttttacttataaaaaaatattgttatggtaatatattctatttacaattttataactttggtttacaataatagagacaataaatcctaaaaaacataataagaaaaaagtgcttaatattttagaaagactggtttagtttacaccagctaagccagtcaaggaataatttaaagtgtaatatataataatgaaaaagaacatgctattagaagtttctaatgacatgttctttttttgtagaaatcagcattattatataaaaatttaatactataaattttaattgtattgtaactaagcatgtattttaaacatagtatgatatagacccaaaatggagggattataaatgagaaaaattatactttatttaaatgatgatacttttatatctaaaaaatatccagataaaaactttagtaatttagattattgcttaataggaagtaaatgttcaaatagttttgtaaaagaaaagttgattacttttttttaagtgagaataccagatatattaaaagacaaaagtatattaaaagcagagttatttattcatattgattcaaataagaatcatatttttaaagaaaaagtagatattgaaattaaaagaataagtgaatattataatttacgaactataacatggaatgatagagtgtctatggaaaatatcaggggatatttaccaattgggataagtgatacatccaactatatttgtttaaatattacgggaactataaaagcatgggcaatgaataaatatcctaattatgggttagctttatctttaaattacccttatcagatttttgaatttacatctagtagggattgtaacaaaccgtatatacttgtaacatttgaagatagaattatagataattgttatcctaaatgtgagtgtcttccaattagaattacaggtccaatgggaccaagaggagcgacaggaagtataggaccaatgggagcaacaggtccaacaggagcaacaggcaattcctctcagccaattgctaacttcctcgtaaatgcaccatctccacaaacactaaataatggaaatgctataacaggttggtaaacaataataggaaatagttcaagtataacagtagatgcaaatggtacgtttacagtacaagaaaatggtgtgtattatatatcagtttcagtagcattacaaccaggttcatcaagtataaatcaatattcttttgctatcctattcccaattttaggaggaaaagatttggcagggcttactactgagccaggaggcggaggagtactttctggatattttgctggttttttatttggggggactacttttacaataaataatttttcatctacaacagtagggatacgaaatgggcaatcagcaggaactgcggctactttgacgatatttagaatagctgatactgttatgacttaaaacgtgtctaaaataatcttaaaaactatttaggttttatttaaatgacaaaagtatttttatatattgagttttacctattttagaatgaataaaataacaataataataaaatatattcataaaaattttaaatttatggatttttatttaactttattatcaatatatgtataataaaaaactgtctcaaatatagatttgagacagttttcgttatttaaaaattttatattatttaaaatttttgattgcagtagttaaattagggactaattgtttttttcttgatacaacacctggtgcaaatgtaccttgaacaccttcaacatcaaatgcgttagcaattaagctatcttctgctttatagattaaataagaaccttctttgattatatctgtaaccgcaagaattagtttgtcataatcagtcgaatttatataagataaaaactcatcttttttagcaaatatagagtctatgtctaaggtaaatacttgtccaataccaactctatgtccactcatattaaattctttaaaatccatatttactatttcttctatagtatattcatctaaagaagtaccgcatttaaacatatccatagcgtatttttccatgtctacttttgctattttacttaattcttcacaagctttcttatccatatcagttgttgttggagacttaaataataatgtatctgataatatagcagataaaagaagcccagctatttcataaggtatctcaacattgttttctttgtacatttgataaattatagtactattgcatccaacaggcataactctaaatgacataggaacatcagtagaaataccaccaagtttatgatggtcaattatttcaactatgtttgcttgttcaattccatcagcactttgagcatattcgttatggtcaactaaaacaacattctttttagatgggtttaatagatgaccttttgaaactaaacctaaaaacttattatcatcatctaatattggataagatctgaagtttgtttctagcataatctcttttatttcatccatataatcatcttctttgaatgtaattaaattttctgtagcttctatagagtctaagaaactacattgatttattacattagaagttttataattgtcactttcaacagaaacaacagacactccatttatcttagcaagagctagcaaatcttttgaaatctctgtatgattagtaagtattaaaagtttaacttttgtatcaatagcatattcaatactatcatatctatctccaacaatagctatgtctccttcttttaaagtctctattagagtctccattccaaatgataaagtgactactctaccttttatatcttcaccacagtccacaagaatagtaccattaaggtttttacaaatgtttgatagtgatgtgtgtatagttgtaaagtgttgatgaagtagatttttagctatttctttcatagtaatgataccagcaaaagttccatcatcataagttacaggtagtgttttaacatttttttcatccataaggttataagcctctaatatagatgaagttggtgttaaaggtactactttatcataatttaaatctctaacttgtattctaacattatctaaaatttcaggtgcatctaccttaaagtaatccaaggcatatttagcttcttttctgatatctcctaaagcataagctgttgcttttattcctagtttgttctttaaatgtgctaatgaaattgcagaacatattgaatctgtatctggatttttatgtccgaaaactaataaactcattttaatactcctttcaaaacttgaatataataataattgataaaaatattatatcaaaaggtagtgagtatttgttgtaaaaagaaaaaaatttagtgaaaaaatattatataaaatttatttcttacataaatactacaaatttaatataaaaattattattatatatatttttacccaaccaaacatagaatcaaatttacttttatttaaaataaattgattaaatctacctgggaaaaaattaattaatatgttaataaattaaaaatttataaatattttatactgtaaaaaattttgtatatatattatcattaaaaaattaacggtcttaatataaaaattatttatctatatgaaaagcataattattacatattgacttaaaaataacttatagagattagaataattttagtttgtatattttttaaaaccatacagttgttataaaaagaaaaattgcacacaagtcaaaaataagtgttattttataaaaatacgacaaaaattttatttactacttatacaaataacatgcaaataacatataaaatttaataagtaaaaaaaatgaaagatataaattatcattttagtattttatttagttgaagtaaattattcaaatgaaatatatctcatttagataaaaaattttagtaaaagtaaaaaaaataatatatttgttaaaaaataaattgacaaaatattcagaaaaaaacttcttgacctaagagagtaaaataaataaaatctaaggtatagagatgaaatctataaaattattttaagtataagttaaaaatatagatggtgcatttaagatttataaaaattagagatgcataattattttagggaggtttttagtatggagaaaaaagaaaaggtagtagaaaaatcaaatgttgaagtatgtagtcctgaaattgtcaacagtgttgaaacattaagaatgagattagaagaaattagattggcacaaaaagaatttgcaacatttacgcaagaacaggtagataagattttcttagctgcttcaactgcagctaatcaacaaagaatacctctagcaaaaatggcagtggaagagactggtatgggtattgttgaagataaggttataaaaaaccattttgcctcagaatatatctataatgcttataaagatactaaaacttgtggtgtcatagaaaaagatgaagcatttggttttacaagaattgctgagccagtaggtgttttatcagcagttataccaacaactaatcctacatcaactgcaatattcaaatccctaatagcactaaaaactagaaatggtataattttctctcctcatccaagagctaaaaactgtactatagaagcagctagagttgtacatgatgcggcagttaaggcaggagcaccaaaaggacttataggttgggtagatgttccttcgattgaattaactaatgttgtcatggcagaggcagaccttatattagctactggtggacctggaatggttaaatctgcatactcttcaggtaaaccagctgttggagttgggcctggaaatgtacctgcaataatagatgagagtgcagatataaaaatggctgtaagttcaatcttagtatcaaaatcattcgataatggtatgatatgtgcttccgagcaagctgtaatagtaccagaaaaaatatatgaagaagttaaaaaagaatttaaataccgtggagcacatttcctaaataaagaagaaactgaaaaagtaggaaaagtagtaataattgatggttcattaaatgccagaatagttggacaaccagcacatgtaatagccaaaatggcggatgtagaagttccaaaaacagctagaataataattggtgaagtagaatctgttgaattaaatgaaccttttgcacatgaaaaactttctcctgtacttgcaatgtacaaatctaaaagttttgaagatgcagttgctaaagctgaaaaattagttgcagatggtggatatggccatacatcttcgttatatgcagactctataaatcatccagatagagtagagaagtttgtaaatgctatgaaaacttgtagagtattagttaatactccatcgtcacaaggtggtataggtgacttatataactttaaattagcaccatctcttactcttggttgtggttcttggggtggaaactcagtatctgaaaacgtgggagtgaaacatttacttaatatcaagacagtagctgaaaggagagagaatatgctttggtttagagcaccagaaaaggtttatttcaaaaaaggttgtttaggtgtagcagcaagagaatttaaagatgttatggataaaaagaaagcctttatagtaacagattctttcctttacaataatggatacactaagaagctaactgatttgttggatgagatgggaattaagcatactacattctttgatgttgctccagacccaacattagcttgtgcaagagaaggagctaaggctatggctgatttccaaccagatttaataatagctgtaggtggaggtagcgcaatggatgctggtaagataatgtgggtaatgtatgagcatccagaggtagacttccaagatttggctatgagatttatggatataagaaaaagagtatatgtatttcctaagatgggtgaaaaagcgtattttgctgctatcccaacttcagcaggaactggttcagaagtaactccatttgcagttataactgaccaagattcaggtgtaaagtacccattagcagattatgaattaatgccaaacatggctataattgatgctgatatgatgatggagatgccaccaagattaacagcagcatcaggtgttgatgctttaacacatgcattagaagcatatgtatctatgttaagaactgaaccagctgacggtctagcactacaagcaggtaaaataatatttgaatatctacctcgtgcatacaaaaatggaaagaatgataaagaagcaagagaaaaaatggcaatggcatctactatggcaggaatgtcttttgcaaatgccttcttaggaatatgtcactctttagcacataaattaggtgcattccaccatgttcaacacggtgttgcaaatgcattattaataaatgaagtaattaagttcaattgtgcagaagctccaaataagatgggtgcattctcacaatacagatatcctgattgtatacaaagatatgctgaatttgcttcttttgcaggaatcaagggaaatacagaccaagaaaaagtagataaccttataaaagcaatagatgaattaaaggcaagagtaggacttcctaaaactataaaagaggctggagtagaagaatctaaattcttagaaacattggatgttatggttgaacaagcttttgatgaccaatgtacaggtgctaatcctagatacccattgatgagtgaattaaaagagatatatctaaaagtttattatggtaaataatattcattgtacaacataggttctattgggtttgtatataaattattagatttgaatataaatagagttttattagagaaacgtagaagtaactataaataatagattataacttaaattctgaatggaaatgataaaaagtcagtaatttaatggtaatttcgaatatgtgtatttaatcaattaactttaaaattagtcggaaaatttttttattacatataattttaaagcataatatataaaaaactttatgaaaaaattataaaaatattcagaaaattctattgactaatttatttatcatgatataataaatttagaaaagaaaaaaattggggcctattaaggcccccttactattttttgatagatttatttaaaattactttctcattttgattttttatatttattatagagtcagtataatccacttcaaagttggcaaaagcagagaataaatctatatctcttaacaaatgaattgtcatacattgattgttcttatttatccttagaatcaatgctcttacaaatggaaattgtattctagaattaaataagttagaaccatcagtatctatatctaagctacgataattaatatctataaatatatctacatcatcattttcttctcttattattctgtagtcaaaatctaagtttaaatttaaattatctaaaatcaataacatttaaatcctcttttctataaatagttttagagtgttaatttaagctctccatctattatagatataattctatctgcttttctagcaatattttcattatgtgttattattataagtgtttggttatatttttttatagaactttttagtaaatccatgacttcttccgtagttttactatccaaatttcctgttggttcatctgctaggattatacttggttttgcagataaagcgcgtgcaatagcaaccctttgttgttgaccaccagataattgatttggaagatgatttttcctctcactaagacccaataaatttataatgtcttcgatgtattcttcatcaacttttttattgtctaactttagtggtaattctatattttcttttacatttaatactggaattaggttatactgttgaaaaacaaagcctactttttgtcttctatattttgctaattttttatctgaaaggcaacatatatctttaccatcgacttttatagttccactacttggtctctcaagacctcctactaaatgtagaaatgtgctttttccacttccacttgggccaattatcgcaacaaattcacccttatttatttttaaatttgcatcctttagtgcatgtacagctgtttccttttttccataaatcttacctaagttaagaatctctaatataggcataattaatcctcctattctgtaatgtttatagcttcaactatactaattttatttattttccttaatggaatatatgtagctagaatacctacaattatgtttgctaaaacaactaggatatatattttgtaatctattgaaaatcccaatccatatgatacaaaattatacgtgtaatacattctaaactgtattataagccctaccacaatggtaattacacttgagagtattccatataatattccctcatagagtatcatatttttaaatcctctctcagagataccaatagctcttaacattccaaattcgctagttcttgaagttaagttataacttatgttatttattatattaaacacactaattataaacattactgctactattccataagcataagtcagagccctagctgtcatcttatcaaagttttctttttccattagcatattagctgttgtagttccaggagattcacttcctatttcacctaagagtgtatttatcttttttacatttgcatttttattaatatctacataaactacattatatttatctacaccagttagtttttttagatagtcgttacttgttattacatctataccctgatctccagaatataggtaattatctgcaaaaggataacttacaatagctccaactttaaactcatattctagatattcataattatcttttagttttatataaagatcttgatctatctcaccttttggatatttgacctttatagtatctcctacttttatatctacagcaggcgtttctgtaccaggagtataacttagcttgtatttatttgttttagaaacttgtggtacgtataatatagcgaggttttcttttttcattctttccagatttatactcccactcactaagtatttttctaatgaatttatcatctcatcattgtaacctcttaacttttgtttcattgtatattttccagtattcttattttttatgaatagaggaaaatccttataataaggcgttgaattaataatattgtagtaatctaatccatttaatttatctacttctattcttgtatctaagatgctggcagttttgactttgtcaattccatttatattttttattttatctatctgattatcattaagtccttttatatccttgaaagaatcagctttattagattgatttagttttaagaaaaaatttgttagaataaaatctgcattcatatatgtttcttcttgaccatttttattttgtatatctgaaaaagaatatttataattctcctttatgatcattatacctcctagactcatggataatataattataatgaagccctttttattcctaaagatatttttagcagatatagattttgttactgatatatttaaagttaattttgatatcaaagaattgaccttatttatatttttatcagttccaaaggtttttcttatagagtcaataggagaaattcttcttatctttaaatatgtaaagaaacttataattagtattgtcagtattatacttccaattgataaaagtattattttatctggaataacaaaaggggtaactgttacattaccttcaaattgaatatttcctgcagtcctattaaatatttgtgcaccaccaatacctgtgcatataccgataggtattgctatcaaagcaagtatgaaaagttcataaaacataaacttgaaaatcttgaagttagtggatccaatagctcttaagataccatattcctgtattctttgatatatcgatataacatagatactatatattacaataccagaaaataggctcatagtaattgcagtgtatttacttgagttatctaaagtaccattttccctagtagattctataagcattttgttttttccaacactattctcatccaacatagtattttttactatattatctatgcttgtatttatatcaatgccattattaaattcaatataagcataagaaaatttatccaattttgattcattgagatttaaaaaaatttcacatgtccctttatttttctcaataggtctatcttcaagtattcctacaactttaaatgtctctggtttttctttttgatataatttaaaagtaatgttctgatttatttctggttttaaacccagactatttaaaatccatttctctacgaccacctcattactagcttttggaaggtgaccttttataagtttggattgattagtcaagtaatttttatttgcatattctaggtttatagctaatctttcattaggatctgtatagccatagtgagatgttatacctaaatttttaatatcttttctagactttatgtattctaattgatttttatttatatctttaaagtatacatgatcacttccagtttctctttttaatttatctacctctgcttgttgagcacttcttgagagggtaccaataccaacaataagtgatgtagcaagaattatacttagagcaattgctaaagaccttgctttataacttattatgtatcttagtgctatttttaaattatctttcatatttaccacttcctttcttagctaaatcaattatatgtttatttaaaatatatatcaaagtaagtatcttcaagttttgagtacttaattgtacaaatttatatgtgtatttgcaagtttaattaatgtacatgtaaattttgactttttacataatttttctaaaatgatataatcctcatataaagtgtagatgggaggggaattatggagaataattttatatttcctatagtaatactaactttgtttatatttagtaatcttataatgaataaatacaggttttataaagaattagacatattaaaaagaggaatattaacgttttttgtatcgtgttttgtatggattttattcatggagggtattgagtatatacaattaagtttaggatataattttttacttgaaggagtattaaatattatactttttttaattttaattattttaagcttttatataggatttaaatttataagattactagacaataacaataaacaagagtataagctacaaaaattagacagtaaaataaatcataaggacaatataatcgtaaaattaagaagtcaaaaacatgactatttaaaacatttacaagtagtatattctctattaaatactgggttagctgaagatgcaaaagaatatataacgaatatatcaaatagctttaaatcaaaaaattcaagatatgggaaagtatcttatttagatgctatagcttccttaaaatatgaggaatgtcttgaaaagaacatatcttttgatgtatatatccaagattttatggataatttagagattgaacctaatgatatgagttcagtgctattaaacataatagacaatgcaatagaatctttgtctgctatacaaaaggaaaagaagtatataagattacatgcatatgaagatgaatttcagtatattatagccataaaaaataatggtcctaaaatacataatgtcgaaagtatatttttggatggatttagcactaaagaagggcaagacagaggttttgggttatatctagttaaaaatatactagataagtatgattatagtatacttgtaaatagtgacgattttttaactgaatttgtaattttaataccaaaatattattagttaggaggagagaagtctgtgataaaagttttgatttgtgatgatgataaaattgtaagagatgatatagcaaatatagttaaagagtccggatatgtagattatgttaagaaagtcaaggatggtatagaagcaattgaatttataaaaagtgagaaaatagacttattgattattgacattgatatgccatataaaaatgggattgattctgccaaagaaattctttctatagataaagatatacatatagtttttgtaacaggttttgctgactatagtcttgagagctttaaagtacatcctatagattttatagttaagccgtttaaaaaagaaaaaatacttgattcaattaatatagcaatagaccacattaactctcataaaattgcaaaaaataattttatagaagatactctttttgtatataaaataaggaaacagatacatatgattaattttgatgatatagtcatgtttgagaaaaattcaagagctattaatttatatactagagatgaagatacgataaaattttatgagaactttgatgatttaaaaaaacgcctacctcctaatttctttatgactcatagacaatacatagtaaatttaagacttatacataaggttatacctataaataagtcttctttagagataaaatttataaattttcaagaaagtgctactttaaataaatctttagaaaaagattttctatacagattttatagggttaaaaggttttaatgaagaaaaaaattttcagtgatatacaatatgtatgatgaagatatcatataaatttgctatagttataaattaattcgtataaaatataatataaaacatattggactttcatggaaaattagaaagcccaatatgttttagagataaatcttatatttataagttgcttaagatactagggtctttaatcttattatcttcagcaagtaataagattttagacataatctcagcagtcttagggtcttcatcagcgaatggaaggaatatcttacctctactttgagaatgtacaggaagtatattcaaagcacccatcccttttttatgtacaataccagaacccatatgcacagaatactcacctaaattacctgtgataagaacatgagagccttcaaaattgatattgttaatttttaataataataaaagttctttagcaattgctatacgcatctctacagtagaatggctagtttcagggtcaacaccaccagcatgagcgacacttacaacaaggtctatatcacgcataacttctgagaatagaattggaggtatagaagctaattctaaacttttataagtttttctatcaaaaaattctactgtttcaatagtaggaggctctatatctgctggtgaaaaccaatctgcaagtgcaaacatctttgccactatattttctttataaaatactttctgtaatccctcttcataatcgacagtccaaagctgatttctaagaagtgctacagttttctttggctgaatttggtgaccagcatatctgcgagatatagttttttcagatatttcatcagaatttattctataatactcacggaatacttgcttaaatggttgaacaagttgcttactaaataaatcatgttggaactcactccacttaccagattcaaacaaatgaactggatgtgcaagttttaatttattttttgctgtcaacttataagtttcaccttctatattgcaaataaagaacttagacttatcattataaacatatccaatattatcatcacatacccatactagatttttaatcaaagggcagataactggatttttatagatattggcaatttctttaactgtaaatactatttcatttttcatagcttgttctaaactctgttttgcacgagaatactgactctttaaatctttttggacagatttaagttcaagtacatatggatgtttagcaatagcttttggtatactctttaaagacttgttgcctttttgaactttagtagatgcttttccgctttcatcaacatctatccaaattgaagtaccatcaatatcttttggtttaaatagatgagcaacttcatttagtttttcagtctcaagagcccacatcatacgatttacatctccaaatccagcacttctagctagattttctagcgctatagtacaagcttttgattcactttcacgacgttgtgcaccaaattgcttgctttctttagcaaacttttgaataaattcataacggaaagttgcttcttttaggtctccttttttcataggaagtaaagagaaacttctcaatttatcttgatttctatttgtttcaatttctttcatcaacatgtctttatcaagcttaccaagtgtagcatcagcatagagttgtgcacgtctatgagagttaccaccactagttatatatttagctgacttgtaaagtatattgaatctttcttccccaatagttttatatgaatctaagaaccaatctacatcaaatgcaccatcaatgaaactacgtggtgaaataggggagaatagagcaacctctgattctttttgtgcagagaagccttcatttatatgtgcatggaagtaccaaattgtacttttcagacccttccagtttaaatatttttcaattatgtttacccattgaggggcatacatagcagattctattaatcttaactcagtaatgtcggtatttttaagtaaactttttaatttttttgaatcatcttctttagtaggatagcaatttttaagtagagaacttaaaacatctttttttgaataattgctaccatatgaatatcctctctggaaagtttctttaccaagagcgaccaaaatatttacaaaataatctataccttcaaagtattgtatattattagctagatgagacacttctgttggcatatcacctctacgtgattcaatttctataattcggtttgtaacagtttttaaattatctttaagccaagggtacttttctaatgtgtcaccagcccatctaggatttgttaatgttcttattatatttgatgcgttgtatccacttatcatttctctattaacttgctcttcagtcattaaacctaattcatgtgcacgagcaaacacatttatgctagtatagaaaggaaacttatattctagcaactgataatttgaaaacgtagtgtagaaaaacttagtaaaagaaatatcatcataaataaacgaatgtgctttatcaagccaatagtttaaaataggggcatttaaagcagggcagtattcattttgtctgtaatagtttttagtaaattcaactctttgttttttacattgttctatagtcaataagtttctaagtttatagtatatttctaaacaatagttaaatatttctttatggtcaaactcatttagtaaaactcttaaaagttttcttgtaagtccattaaatttaaatttttcaagttttgtatatattttattttgttttttagagtcaaggacatttgaatatatagatgaaaaccaacttttttctgtttcattatatccacatgtacttatactataaaataagatatcaagtattaatttgtaatctaagtcaagctttttactagtttctctccaaagttctgccaatggataattatcaagagtatcattagaaactttatatttaataggagtcaagttataagtagaataacctaaaagcactttgtctacattacctgaccatctttcaacttcatattcataatctgcattttcagtaataagctcatcaaatttttcataaacttttattattttatttatatccgtatcgagaattttttttgcttctttttttgttgctacagaaacagaatcctcactagtagataaacttatatttgaaataattttattaagctttgatgagctattagaatcatctttaaaatcaaattgttctggaatttgaactttgttttcagggttatatattccaaaaccattttctttgcagtaatcattttttgctttacctaacaaattatcaattaatatttgaacttgagatgtattctttttagatttatcaatatcctctataagtaaaataagcttattatatagttcttgtctatcagaattgtcttttaataagtttacaatttcaagacctccaaggcatttttgagaatttgaagattttatcagtgaagaagcaatattttccaaatttgaatcatcttgttcaagtaaaatttttattactgtttgtctaatagagcttgtctttaaagacaatagattggttatcttatctaattctacatctgttagctcaagctttctaagtaaactcaataccgtttctctattggaaacactcttatcacttaaacattccaataaaaattcacgttgtctatctgtctttggttcatttacaaaattgactataagtgaagctcttaaatctgaactcataagatgacaattttccataagcacatctataaattgagcattcatatcgtatgctgttaaagtcatcatacatttaagtatttcatgagaagaaatttcaatccaagtccatggaaatacacttcctgaaaatgattttgtctttgaatttaaaatttctaaagtatgttttaaactttcaaattgttcttttctagcatcaaagtctttgtcaataggagtgtttgacaagtcaaaattagtttctctgttttgccaactatagtagtagccaacagaaccttctacatagaaatttgtaattacccatgctagtatctctaaatcatcacccttaatgtttttagatgctatagaatgtttaaaatatgtactttctgtatgcgataaaaagtaaagagctacaagttttttatatttttcctgacaagaaagtaagttttcaataagagagtaagagtcatatatgttgtaagttgcagtagcccataaggcaaaataaatttcaagattatcattgctattaattgattctatacggaacttttcatcagtcaatgatttatatgaaagttctaaacatttacgtattattccaggtttttggtctgaaaaaccaagtcctgtccatgtatccaaggctcttataacagaactaaatcgctctaaattgttgtccaaaatagtttttaacatgtatattgatgcagaaattgtaccctcatctaaactctctacaatttgctgtctaagtccttcttgttgtttggctgccaaaagaagtttagaaagcatttcatagcatttatcactatgactcttcatgataccaattatcatttgtcttgtaagtagagcagtttgattttctccaaatattacttcttctaaggcacttgttactttttgatttcctttgtctatttctagtgctattttatcactcattatagagtcatagtacaagaccttatttggaagagtaagataatctataactgaaaaatcataataaattaaatcaacatagtttgaaataaaccttataatacctctaaaataatccacaagtttatttgagcgataccctttacgataatatcctcctgaatatgtataatccatctttcttttaattaattggcaaagttcttctacttgttcagaagtaaatattaattctaatgcattttttaaaggtccagaaaggagctcgtccatatttttaatttcgtagtagtggcaattgtagtatttctttatcatatttaagaatttgtcctcaggttctctataatagtatgaactattttctatgcagtcccaaagagattttgctaagtcgtagtactgttttgaagaagatttagtaaaattatttttaaaattttcaattattttaggatttttttctactctagtacgttctaacatttatgtacctccaaattatttattttaaaacattcttccagcaagcaaggtaagtcttataaaagtaaatatatctccacttttcagatttataggggaatcgagtttttcaataacatcttcatttataagcactttgtagattccatcttcaaatgcctgtaacgctacttctattgccttttctacagattgtttattctcattgtaaatagagccaaatccaacttttccaatatcagcttgagattcaatttcttcattagttaagaagtttattattgatttttctgggattttctcattatattcaagaacatttttagatacaatttcagagatagcttcttttaggcaattgatgttgtcagatacatcaaaaggggtaagttctaacataggtttgcgtttgccaacagccttaactctaaaataaatttgcataaaatcacctcgcaaaatattaattatgtatttagaaatttaaaatttatctatttgttatattatatcattttgtgaattattaatgtgaattatggaattattttacaaaaaatagaaaaaaagctatcttaaagtctaaaaaagcaataaaagataacttttaactataattatatagaattataactgtacatttattaaattttaattttagaattatttttgataactatctttttttatttataaattttgttcctaaatattttttgatatcttcttcaggagaaaagtcatcaataagtatttctttcccagtgtcttcaaatactacaagaacttcacagtcaccttgcaagaaaaattttctaactgtatcttctttaacttctctaacttttattacattctttttttctttttcaaagtcttttgtgtaataacttcccatcatattaattatttttgtatatctattcataaaatacctccatatgcgattaaatttaaaaaatatgttataataattgtttgtattaacttaataattataacaaggagtaataataatgactagtataaaaaataaagatattttaaattgtatagattattccattaaaaataagctctttgacaaactaaatgatgtatataagtccttgccagtaggaaattgttctggatgtggaaattgttgtatggagtcagtaggtataaatttaattgagtttttgaatatattttgttatcttgaagatagagttgatttaaaaaaaagctgtataagtaaaatattagattattattttgaggagtatacaagaaagaacccatgtccatttaaagatactaataatagatgtctaatatatgaagttagaccattaaattgtaggatgtttggacattggaaaaaagaggattataataaaaatttagataatgttattgagaaaaataataactatagagagttaatgaaaaagcaatatggatttgaaataaatgatgaagtagtaaattacaggatagattattgtgatagatttattccaaataaagattatttaagtaaatctaagagattaagcttttttgatgagcttatgatattagactcaaatatttattcaagtggaaatatagatatagactttagggatagaggtatagttgaatattttatagagtcattactttatagaaatttagcatataatgtgaaaataaggatatctaaagaatacaaaataagaaaaagaactatagatagaataaaaagaattgttcttgtatagttttatattagtaagtaataaattgtatcataaatattgtcaaaatgaggtgaggaaggtgaatcttacaaaagtaaaaggaaataccttttttataaaaggtggcacgaatacaggaatatatgtatttgaagataacacagcacttatgatagacccagggttatgtggttcaagacctaggagagtaaataaagtattagatgaaaataatatacaggttagatatattataaatactcatggtcatgatgaccactatggagcttgtaatcaatttaaagaatattataaagatgtgtgtataatgtcatctgaatacgacaaattatatatagaaaatccagaattgttttcaaagtatattgttgggggaaagagcaatgtatttatggataatatcttaaaaaataaaatgttggatgatataaagatagataaatctatagaagttggaaaaattgaattaaacaatgaaatgtttgatataattgagtttcagggtcatacacctggtagtatagctgttttgacgaaggataatgtgatttttgttggcgatttattgataggagatgaaattctatcaaaatacgatttcttgtttctatatgatatacaagaacaaataaattcattagaaaaattaaaaaatatagattttgagtacttagttttagggcatggcaagcaagttatatcgaaagaagattcttataaattaatagaaaaacatttgaatgctttaaaaaaatatttatatcaaataagagagttgcttgtagaaccgaaatctttagaaattttattaaaaaacattataaataacaataatttaagcaataattataaagagtatcatttttttaaatcttcgttagtatctgtcataagttacttagttgatttagaagaaatagggtatatattggaaaatggagaattgctttactatacaaaaacaaaataaattatgataaaataaagaaggtcataaaaaacaaataaagggtgagcaatatggaatacgaaaaatggaatgagatactagcaccttatgaacatgcagtagaggaattgaaaataaaatttaaaaatataagaaaagaatatttagcaaaaggtgaatattctcccatagagtttgtcacaggcagaacaaaaaaaatatcttccataatatctaagttaaaaaggataaatgcaaaagatatagaaactgaaattgatgatattgctggtataagaataatgtgccagtttgttgaggatatatatgctatagttgatttgataaaagtaagaaatgatatgactataataggagaaaaagattatattacaaattacaaagatagtggttatagaagctatcatgttataataaaataccctataaactccattgcgggttcaaaggaaattatatgtgaaatacaaataagaactcttgcaatgaatttctgggctacaatagaacattcattaaaatataaatatgaccattacatacctgagactcttgctgaaaggcttagaagagcatctgatgctgcctttcttttagaccaagaaatgagtgaaataagagaggacataatgaaagctcaggctatgtaccaaatgaagtctatagctattagagatactctaaatagaatacaagagttatatgacttgggtgatacacataaagctatgcagtaccaaagaaaacttgatagaactgaaacagataaaaatataactgaaattttggaattaaaacaagaaatagatatattactagagcaatataaggatactaaggtagatgataaagtagttcagtaaaaaactacttgtagaaaatttgctaaatattaatggggctgcctcttaatggaaaataatttctaaaaagagacagcctatttagtgtaattaagaaaggaatgatattatgagtttgtatgctataggtgatttacatttttcaacatcagtcaataagccaatgaatatctttggaagtaattgggatggtcatgaaaagaaaattatagataattggaaagaagttgttaaggaagaagatatggtcttagtactaggagatacatcttggggaattaatttatcggaagctaaaaaagatttagatataataagcaaacttccaggtcagaaaatacttataaaaggaaatcatgattactggtggacaaccgttacaagtttaaataagctatatgaagacatgcgttttattcagacaaatttttatgaatataaagattatgcaatttgtggaggtaggggctggatatgtcctaatgatgttaaatttgatgagactgatgaaaaagtttataaaagagaagagcatagacttagactatcattagaatctgctcgtaaaagtggtcactcaaaaataattgtgattactcattatcctcctacgaatgataaattggaagaatctttatttacaaagttatttgaagaatataatgttgaaaaggtgatttatggtcacttgcatggtaaagaatcttttaaaatgggattgaaggggattcgaaatggagtagaatatacattagcatcttgtgactatacagaatttaatttaataaaagttcacgattaaaaaacataaattggtaaatactataagatacatgattaaaaataaatatttgagggatttcggttttgagaaaggagacacgacttatgaggtggatattagtttttatatttttatatcttattcctttagtagtgatattcagaaattacaagaattttaagaggtcttgtatctacagtagtatttatgtggtattagctacaacaataatgataagtaatatttatatgagtggacttaataaaataaaagagtctatgtattatcacaattatatttctgatgagacatatgatgaaaagtatgtatcaaattttaaggaaaaagaaagtaccgatttaaaacaggataataaaaagaatgaagaaatatcaaataataaaaatttaaacaacaaacaagatagaaatatacaaaataaagaaagtaatgaagaaggaagtaatgatataaaagaaaagaataattctgatagtaatgtttcagtgaataataaatcagaaaaacaagaagataatacaaaagaaaataataaatatacaagtaaagaaaaaaatagtgaagatataaaaaaaatagatatggaaagtataggaatttttaagaaagaaatttataatatagaaagagcagctttagttccaatgagagaatgtataccttacactaaggatatagcaaaaaatataactaaattatctagtataaaaaaagatgttacaaatgccagaaacaagtgtaaagaagttgtaaaagaatatgaaaatatgcagattccagaactttctaaggagaagtatacagaaacattgagtaatgctagagatgacgtaaagaaagcatatgagcttagagaaaaatctatggaaagtgctttgaaattaataaatactaaaagccctaaatatatagggaagataacagaatatcttgatttatcagataagcagatagaaagttttaaaaatagattgaacgatttaaaagaagaaataaataattcagaaacaaataatattaattaataagatttaaagatataagttaaaagggagattatgatgaataaacagagtataggaaaactaaatatgttttttatggggattactcaaagaaaccttgataataggcatttttttattgagttagaggtgatttttaaatctggaagaaaagagtttaaaggaattgcaatagaggaagataataaatataaatttaattttaaaggaaaatcagatttatatacgtttaatgagttgcttaagaatatttctaaagaggcagaaaattatgatggattagtatttaaatatgttgagcgaggaactattgttgtaattgaaggagacaataagaaggtaaatgtaaaatatttagataataaagaagaagtacctaaaatagatgaatttacggcatctcaaataaaaaacagagattattatgtaaaagtaggacaagcaaatgcacttttaaaagaaattggagtacttacaaaagatggtaagataaaaaatgataaaataagaaaatacaatcagatagaccattttgttgaattgatagatagtattttaaaagaaataaaggataaagactgtataactatcttggattgtgcttgtggaaaatcttacttaagctttgtcttaaatttttatataaaagaagtattgaagaaaaactgttattttataggaatagattattcagatgtagttatagaagcatcaaaaaatatggctaaaaacttgggttataaaaatatgtcatttataaaagaggatttgactaattatacacctaatagggatgttgaccttgtaataagtctacatgcttgtgatacagctacagatatggcaataggtctaggaattagagcaaaatctgaagctatagtagtagtaccatgttgtcataaggagttattagggcaatatagatatgaagctatggaaccaatattaaaacatggtgtatttaaagctagatttgcagatttgataactgatggtttaagaacattgttattggagggcaatggatatgatacttctgtagtagaatacatatctccacttgatacaccaaaaaatttaatgataagagcgataaaaactaaaacgaataatgacaaagcattaaaagaatataaagaactgaaatcacaatttggagtggaaccaaccttagaaaaacttatatattagttaaaaatgtaaaatttacgaaaagcttgcttaaatatgcaagctttttggtattatataggtatagtcatatccagagttttgatttataattaaagctgtgctataatatttgattaatcaaatcaataaatgttacatggaggtaaaaatgaacaaattgaatatatgtattgatatagatggaacaataacaagcccttatcattttcttccatacctaaatgatatctttaataaaaatataactgaagcagagtgtataacacataattgggaagaattgtatggttcgggaataagagatgtgtatgcggagtttaataataagtatatacactcatatgatgaagcaaagattgtagagggtgctacagaggtaattagcacattatctaaaggacataatttatcttttgtaacggctagacatgagtgtttaactgatgtaactaaaaattggctatcgagacaaggattttcagatatagatgtttacttattaggaagtgattataaagttgaaaaggcaagagaactgagttgtgacatatttatagaagataatcctttaaactcagtgcaactagctgatgatggtgttaaagtaatacttctggatactaactataataaagatgttaaacatcaaaatatagttagagttagtaattggatagatattgaaaagattataaaacaaggtatttaaagatttgtagattgaaagggggagcatatgatagatttaaaaattgaaaatagaaaaggaaaaatccatgtaaagagcagtgaaataaaagacattttagaattacgtccagacttcgaatatgtacaagatatatcaaatactataaatcaagaaaatatattggtatttgattgccagttgacaggaaattcttttgatatggatgatttagatatagaagaaatattggaagagttaggtgaagaaatagatgagtcttatttcagtgttttatttgaagatgtaagagcgtatttaaaagatgctactgatgagatagaagcagacttacaagataattacttatttgataatttgagatgttattttgatatatacaatataaatcaagaatttacagattttaagtttgtatttttagtttcttttaaagatataaaaatttcttcattagcaaacctagctaagattgtttctaagagacagcttataggtgcatctaagttttatagttaaaatgaaatattattataataaaagctagtagccttgtaaaaatataggttactagttttttatttgttcactttcacaaaatttcagaaaactatttacattctaaaaaaagtaatgtatattaaacataatgtacagtataatggataaaaagtttctattaaattactaagtttatttaataatcaaaataatttatcttatattagtatgtattagggggtatttatgcaaagtttaaatgaaataatcgctgaaaatttaaaaaagataaggaaagaaaaacatcttagtttagacaagattgcacaacttagtggtgtaagtaagagtatgctatctcaaattgaaaagtgtgaggtaaatcctactatatctactttgaagaaaataactaatggactaaaaatctcatttacatcattgatggagaggcaggaaagtgacatagaattgattcaaaaaagtgatatagaccattttattgaagataatggaaagtatataagttatccaatatttccatttgactccaaaagaagatttgagatatttatgattgaaatagaagaaggtggaaatttagattcaaatgctgaacttccaggaacacaagagtttataactgtttttagtggcgaagtaaccattaaaataaatggagaagattacattgtatctagtggaaattctataagatttaaagctgatgtatcacatatatatagaaactcaggcaaaggtatagctaaaatgagtatggtagtatattatatataaataatttaatggaattagagtgatatttagatgattttaggtatgaagatatattatatttaagttataggagtgtgatttatggatgaataataaaaaagcagtttttttcttttgtagtgatttaaagaaagacccagtagccagtaatgtgataaagtgttgtgaagaaataatggatttaaatcaaactgatattgttattgatgataattttgtattagaatttaaggataaaaacaataacttatttcattttgtaaaaacaaaagatgtaataagtcataattataaatattatcttccaattttaaatagacatttcagagattatgattttgcaggagttgtaaattggcatgagggagaaaatgctccagaacatatcctaacagctcatacaattggagatgttccaacaggagaatttggaaattcaaatccaagatactttaaaaatctaatcaatgctattgaggatataaaaaatgaaaatctacttgatgaatttactacattaacagaagcaactcactggtctggaacaacatatggtgaagaatctaaattaattacagaatattctgtacctatgttggatattgagataggaagtagtagtgatagttttaataatagtatagcaatacaggtattggcaaaatcattaattagagtatttgattgtgatgaacctttgaagactttattatgtgttggaggggtacattttgagaaatctttctcagatattataaaaaataaagaatataacatatcaattggacatgtattgccaaatcaatggattgtaagtggaatgtatgatgatgaatcgggatttgagaaactagaaaagtgtataaatagtattgaaggtggaattgattgtatagtttttcatgataaattaaaaggtacctataaagagcaatgccgtaaactaggtgaaaaacttaatgtacctgtatttaaacataaaatattaaaaaatcccaaagacttacctatatggtagtcttatacagttaatataacaataagtcggattaatttttaagcgaggtcaaaaatgatattatcttattttgcattattaattagagtagtgctattagcttttgaaagagtagttgtaagattattaggtgatgaagaaggagatatttataaaaatatagcttcatcatttctatttttctttatagggggagtatgtttacttccatttagcataatggatagagttagtgattggtcgtttttaataccatgttatataagtagtttagtctattcaattggttcagtagcgtatgtaacgtctttagcaactggggaagtttcacttgttactccaataaatagtttaaattcattgtttttactgcttttatcagttatatttttaggtgaaggtttaagtttagcaaaagttgcaggaatcataattatgattggtggagtgtttatattaaaaaaagtaagctcttttttaaagaatgtctctgtaatttttaacaatttaccatgtagattaatgtttttatacatatttttgcagtcagtaggaagagtattggataaggctttttttgtacaagtatctcctatattatattcaactatactgtattttttcgtaggtttaaatttatttatctttttagcatttaaaaagaaacaaaaaataatttgtgagatttttagtaataaaaaggggctttcaattttaagtggtgctattaatggatattcttatttagcattattaattgctttaaataatctagaacttagtatagcagagccattttctcaagtatctatgataataactttaatacttgctcattttatattcaaagaaaatataaaagaaaaaataccaggttcaattttgatactaattggtgggtggctactgttactttaattgacataaaaaatgaattataaaggtgctattagttagtatcagaaaatttaaaaaagtattgacaattcttttaggcaaatgttaatataataatacaaaatagtataaatagaagacatgttactggtaatgcaggcaggatcgaatatattgctttgatttttcaaggtgtttatataggttctgccttttttgcatcttgaatggccattcataaaaaattatggagaaggagattacaagatgaattataaaaaaactgccattgacattattgaacaagttggtggttcaaaaaatattttagctttagaacactgttcaactagactacgctttaagttgattgatagaagtaaagtcaatcaggatgctttaaaaaaagtacaaggtgttatgagtatagttaatggggcacaatttcaagttgtcattggaaatagtgttgttgatgtgtatgatgaaattttaaaagtttgccctttagatacaaatgatagtactgtaaaaactgaagaaaaaataaacttaggaacaagatttatagaatttattattaatatttttcaaccactgatttttgctattgcaggagctggtattttaaaatcactgttgatgttattagcaatgtttaatattttaaaatcagattctactatatatacattattagttgctatttcagatgcaacattctatttcctacctcttatggtagctgtaactactgccaatgtattgaaatgtaatcgtttagtagctattgccgctgtaggatacttattgcttccagcaacaacaactgctttaagtgaaggtgtcgaactatttggatttacaattccaaacattgcctataatgcacaagttttcccggctatcttatgtgtgtcttttttggcaacaatggagaaaatttttaacaagtattcaccaaaaccaattcgaactttctttgttcctatgatgtctttggcaattactgttccaattactctaactattttaggtcctttaggatataacgttggtacaatttttacaaccattattttattcttatataacaaaatgggattcttagttgtaggattacttgctgcttttcttccatttatggttgcaacaggaatgcacaaagcactaataccttattcaattaatacaattggaaagttgggttatgaagctttatatatgacatcttcattagcccacaatatttctgaaagtggtgcttgttttgcagtagccttgcgaacaaaagatgaaacattaaaacaaacagcattatctgcaggaatttctgccttgatgggaattacagagccagctttatatggtattactttacaacataaaagagcaatgttaggtgttgtattctcaagtgcaatttctggtacatttttaggattatttgcagtaaaaggatttgtaattgttggaccagggcttgccagtatgagtatgtttattgacccaaacaatggaaacaatttgatttttgcgagtattggttttgttattgcaatattaggctcgtttattattacactgattatttggaaggaagatacaaatacagtagagtcatcaattggagatgttgttgaagaagagctagaagaagaaaaagaagtaaatatcttagtaactccagtagaaggaaaagtaatagatttaagtaaggttaatgatgaactatttgcaagtaagactttgggagatggagttgcaattataccgaccaatggaaatttatacgcaccttgtgattcagaagttgtgatgttatttgaaacaaaacatgcaattggtttaagaacaaaaaatggggctgagattttgattcatattggaataaatactgtaagtatgaatggagatggatttaaaacatttgttaagacaggcgataatgtaaaagaaggagatttattaattcaatttgatttagacaaaatctcacatgctaatttagattcaactgttatgattgtaaacaataatggagcagattatgcttataaagtgttaaaccagtcttatggcaatgtaaaaaaaggaagtatcttgtttgatgtaaagggaggaatataaatatgagaaagtttccagaaggatttctttggggaggagctacagctgctaatcaatttgaaggtggttggaatttaggtggtaaagggtggtctgtatcagatgtagcaaaggcacactttgatgcagatgtgaaagactataaatctaataatgaaatcacaacaaaagatatagaagaaggattagcacatcctgaagatgaagtaaattatccaaaacgtcatggtagtgatttttatcatcactataaagaagatattgctctaatggcagaaatgggatttaagacatatcgaatgagtattgcttggtctcgtatttttccaaatggagatgataaagagccaaatgaagaaggtttacagttttatgatgatgtatttgatgagttgataagttatggaattgaaccacttgttactatgtcacattatgaaccaccattaaatatcgttttaaactatgatggatggtattcacgacaagttatcaatatgtttgttaggtatgtagaaactatctgtgaaagatataaaaacaaagtgaaatattggcttacatttaatgaagttgattctatgattcgtcatccgtacactactggtggtttagttcgagaccgttttaaggataaaaactttgaggaagttatttttcaagctatgcatcatcaatttgtagctagtgcccttgcaacaaaaatttgccatgagattattccaaattcaaaagtagggtgtatgttaacaaaattaacgtattatccatatacatgtagaccagaagatgttttggcaactcaacaaaaaatgagaagtatttatgcatatagtgatacgcaggtttttggtgagtatccagtatatttactttcgtattttaaaaataataacattcaaatagcaaaagaagaacatgatgatgaaattatgaaaaagtatccagtagattttatttcattctcttactatatgtcttcttgtgaggcagctgatacaactggattagatattacacctgggaatacgttattagctgtaaaaaatccttatttagaaatgagtgaatggggttggcaaattgattcaataggtctacgtatatctttgattgaattatatgatagatacagaaagcctttatttatagttgaaaatggattgggagctaaagatattttaactgaagataaaaaagttcatgaccaatatagaattaattatttaaaagaacactttaaatgtatgttagatgcgattatcgaagatggcgttgaactttggggatacacttcatggggttgtattgatttggtcagtgaatcaacgaaacaaatgtcaaaacgttatggatatatttatgtggatgctgatgattatggaaaggggacatataatcgatataagaaagatagtttttattggtataaaaaagtaattgaaaataatagtatagattttaaatgaccaatagaaggtgagcaaataaaatgaactacataataaagaaagttttgaactcgagcgttgttttagttcatgatgcaaagtataatgaatttattttgctagggaaaggaattggatatggtaaaaaaacaggagaatatatttgtggttccaatgataatcaaatgtttgtccctgttgaaaatacaaaatcaaaaaaatttttagaattaatggatgatattcctgtcgacattttaaagataacacaggaaataatagtagaggcagaaaagttattgaactcatcttttaataaaaacttatacttaatattagcagaccattttaactttgcaattgaaaggatgcgtaaaggaataaaaattacaaatcgagtattttgggaaataaaaaattattatccaaatgagtttaaggttggaatggttgcaatttatatggtagaggagagattgggcattcaattaccagaggaagaagcagctaacattgctttccattttgcaaatgctatggcttcagatggaaattcatatgatacgattaagtatgccaaagtaattggagaaataattaatatttttgttttttctttgaatagaaccttagataaaaagagtatgcattatatgagatttataacacatataaaattttttgtggaaagatttttttcagatagtatgttaagcagtggtgatgatttattatttaatcaaatgaaaaggtcaaatccaaaagaaatgttaattgcattaaaagttagagattttttagaaaagaaatatggaaaaaagttaacaaatgaggaaatagctttcttggttgtccatatcgcacgagttaagcaatagagtgaattactaatattatcttatacgtctacatggtagaaaattgaaagaaggtaaagtatataaagaaactgagacatattattttgttgttcattatgtttattttatgagtgtatcctgttaaaaatttaagttaatatttataattaaaatatacaaatagttaaaataagtttatgtggttatgaatttattttaactatttttttgtttaatggaaaatatgttttataactagaattttatttttaattaattataatacaaaaaactttataaaatcttcagaatttcttaaagaatatgtaagtaacataagatatattatatttagttggtaatataaagggggcaatatttatgaagaataaaaaattcaatgttataacactgataatacttgataatcatatttatgccattaataaagagcagattagtactaattcaaaaagaatttactttgaaaaaagtcgatttttcagtgattataagtgaataaatatatataaacatttaataaatttagaagttaaatgttttaatacgaaaggatacacatatgataaatttagaagaaaagtatttaacacgaaaagacacatatatgataaaaattctagaatacaatggacatattcgaaactggaaagttctctgtgaagaacttggaatcgattcttcattatgtagagatgagcgtgaacgagcaattttagtggaagcatataagacatggggatatgatatggcaaatcacatgcatggaatgtttgcctttgcattatgggatactgtggaaaagaaactcttctgcctaagagaccagtttggagtaaaacctttctattattatgagactgaaaatgggaagcttctctatggttcatctattcgtaagattatggagcaaccaggatttgtgaaagagttaaatgaagacatgttacagatttatatgtctttcacatatgtagcaggtgaaaatacattcttccgtggagtaaagaagcttatgccaggacattaccttgtctatcagaataaaacagtatgtattggtcgttattggaaacctgaatttcatcctgaccacagcaagtctattgaggaatggacggatgaaattcatacaacacttcagaaaattatgccagaggtaaaatcagagaatgaaactgcagagttattcttatcaggaggtgttgattcatcttatatattggcaatgtcagatatagaaaaaacaggttcatgtggttatgaggaagagcgttttgatgaatcaaaattagcacaacagacagctaatattcttgggtgtaaaaattcgagatatataattacacctgaagagtattttgcgtcagtaccttatgtaatgtaccatatggagcaaccaactggagatgcatctgctatcgtttttgctattggatgcaaggcagcagctgaaaacacaaatatctgttactctggagaaggagcagatgagttttttggtggatataatatataccataaggcagagtgttatggagagaatttgaagacattttatattggaaatacaaacattatgaatgagggtgagaaaagaaaaattcttaagaaatacaatcctgatgtgcttcctattgaagtggtaaaaggaatttatgaagaaacagaagaactagatacacttactaacatgtcaaatgtagatattcaaatatggttggaaggagatatttattttaatatagataaaatgagtactgcagttggattggaagtcagaatgcctcttacagatacaagaatatttgatattgcatccagaataccatcagaatataaagtgaaaggaaaagagaataaaattgcctttcgtacagctgcatcaaaaacattaccagaagagattgcttttagaaataaattaggatttattgtgccaattcgtatatggatggctgatgaccaatataataaggatatccgagataaattcaatagtgagatagcagataaattctttaacatagatgagattaatgagatttttaatgactacattagtggaaactctgataattggagaaagatttggatgatttacacattcctagtgtggtatgaaatctattttgtaaaatgttaatacaagaggaagaatcacctgaaagaccattcaggtgattcttaatgttttataattttacttgctaattcttatgtctaactcttaatggtatatcaagtttttttgccagttgtttagattcttctatttcttctggagatatttcatctactactgaaaaagctacttcttttatatattttttgcaatctcttgcaaaacctaacatatagtcaaatgatttttctccaaactttggttgagtaactctattataagcttctttatttggggcattaagacttattgatactgtatctataacatcttttaacagaatagctgtttttttgttatgtattaaatcacttagaccatttgtatttattcttatttttatgctacttttttcttttataaactttgctacctctatcaattcatttattctcattaatggttcgccatatccacaaaatacgatttcatcatagtcgtctaaattgtatttattgaaggcttcttttacttcatctacacttggctcatgctccaaccataaactaccactatttgcaacttcatctttttcgtttcttatacaaaaaacacaactacatggacatgtattagttatatttacatagatactattttcaattgtatataagatattcataattttccctccataaatttaaattcttaattaaaataacgttttttaaaatcaagtttatcaagtgccatacctaagattataaaaacaataaaacttcctattggctgtaataagccaagtaagctcattacaaatgcacttgtaaaacttccaataattataccttcagcaaacatgtataaaactaatcctactatacctgctacaaccgaagcaactatatttctcttatttattatcttgtcacttttagaagtgaaaaataatacaagtattggttttatgattatagttggtattacccagatagcagcacctgtagataaatcagctagaccagcaccaattgcagaagcagctatagcatagtttgttggcaaaatagttgcagctagataaataaaagcatctcctatatgaacatatccattgtttccaccaactggaatatgtaatatatatgctattgtcaggcatattatggatgcaaataatgctgaagtaacaatataggtagtttttttagaagtaactttattcattttttccaatatactccctccctaaaaatccagagctaacataattgttatgttttcttataaatatattaatattaatcatacaattttcatagtttgttaggtgttttttttgtaaaatacagattgtacccattcaaatgtatataattagaaaagtaaaaataggtaaaatgtatagagtaggagtagttagagtaagttaatataaatttaatttggtataaataagaggagtacaagtttaatataaaaaataatataagagagtctactcaatatatactgagctgactctcttatatttgggaaattaaaggctattttgttagataatagctaattaatgaaaaaatatatttataaaatactaatttactctattagtagcagttcctgtttttataacttctacagcactacttaaactagaataaactatattttcaatcgctgtactagtgaagaaaccaaggtgatgagtgaatataacttgttccatagaaagaagtttatttatttctgggtcagttaattctccaggattcatttttttgtttaagaacaatccttcagtttcaaatgtatcaagggcagcagctctaatttttcctgactctagtgcttctattaaatcccctgtattaattaaaccaccacggccagtatttactatgtaagctccatccttcattatagctagagtatctttatttatcatatgttttgttccttcaagtaaaggagtatgtaatgttataaggtcagcttcttttagaaggtcttctaaagaatctttgtaagttaatatatcatttaaatcactatttggatattggtcaaatgcaattacattagctcctaggcctttgaataattttgcagaagtagcacctatttttcctgtacctataacaccaactgtaatagatctaacttctgttccaagaagttcagctatccaacggtaatcaccttcacagacttttttctttactagaggagtctttcttaaaaggttcatagcttgagtaacagctaattcagctattgcattaggtgaataagaaggaacgtttgtaacgataagtccattttcattaactaaatcaaaatgtatcatgtcaacccctgcagttcttgaagctataactttaaccccagcatcttttaaagtttcataaatataaggattatctatatagttagtttgttgtatagatataccatcataccctttagctttaactacattttcttcagtcatgttttcaggataaatatccacttgaacatccttatgttcttcagaccatttttttattactggttcttcataatcgcgtgctccaaatactagtattttcatatcaataccctcctgtaattattaaattattatggtaatttttcatttagaaataatatgtagcatataaggttatattttttatacaaaatttttaaggttaaaaatttagttttgaaattgttttccctgtgttattttgatatttagtaattttttatttaatgtaataattactctaaaatttatcaaagaaattgttattttttagattaaatattattaaaaaattatctaagtttgaaattagttaactaacttgctgattaattacaatgataacatgtgtttttgagtttagcaatgaaaactttttttgaaatgtcaagctttttcataaaaaaatatataaaaaaaacttttataagcatagaaagaatagcaaaatgcaatggatagtggcaagatgccacgatatgaaaaagattattcaattgcatattgttaaaaaacattcaaatcaagcgatattttgattaaatataaagttggcacgataaatgcttaacaatataggtgtaagacaataaaacaataaaaaataattttaataatttttaagttattttagataagattaggaactttgacatcagacagttaatatcagaaaaaagtattttatgagtgatttaatcgaaattttataattgatactattaaggaggaaaacgttatgcttttagaaggagttaaagtagtagaactttcaagtttcatcgcagcaccatgttgtgcaaaaatgttaggtgactggggtgcagaggttattaagattgaacctatagaaggtgatggaataagagttatgggtggaacatttaaatctccagcatcagatgatgaaaaccctatgtttgaattagaaaatggaaataaaaagggtgtaagtattaatgtaaaatcaaaagaaggagtagaaatattacataaattattatcagaagcagacatatttgtaactaatgttagagttcaagcattagaaaaaatgggtatagcttatgaccaaataaaagataagtatccaggattaatattctctcaaatattaggatatggtgaaaaaggacctttaaaagataaaccaggatttgactatactgcatacttcgcaagaggaggagttagccaatctgttatggaaaaaggaacatctccagcaaatacagcagcaggatttggtgaccactatgcaggtctagcactagcagcaggaagtttagcagcattacataaaaaagctcaaactggtaaaggtgagagagtaacagtaagtcttttccatacagctatatatggaatgggaacaatgataacaacagcacaatacggaaatgaaatgcctttatcaagagaaaatccaaacagcccattaatgactacatataaatgtaaagatggaagatggattcaattagctttaatacaatacaacaagtggttaggcaaattctgtaaggttataaatagagaatatatattagaagatgatagatataataacatagattcaatggttaatcatgttgaagatttagttaagatagttggagaagctatgttagaaaaaacattagacgagtggtcagctttattagaagaagcagacttaccatttgaaaaaattcaaagctgtgaagatttattagatgacgaacaagcttgggcaaatgacttcttatttaagaaaacatacgatagcggaaatacaggtgtcttagttaatactccagttatgtttagaaatgaaggaattaaagaatatacaccagcaccaaaagtaggtcaacatactgtagaagtattaaaatctttaggctacgatgaagagaaaataaataactttaaagatagtaaagttgtaagatattaattagtaattctagattttttaaaaggagaatgctaaagatgtacacaatgggattagatataggttcaactgcatcaaagggagtaatcttaaagaatggggaagatattgtagcttctgaaacaatatcctctggtactgggactactggaccatcaagagttttagaaaaattatatggcaagacaggtcttgcaagagaagatattaaaaaagttgtagttacaggatatggaagaatgaactattcagatgctgataagcaaataagtgaattaagctgtcatgctagaggggtaaatttcataattccagagacaagaaccattattgacataggtggtcaagatgcaaaggtattaaaattagataataatggaagactattaaactttcttatgaatgacaaatgtgctgcaggtacaggaagatttttagatgtaatggcaaaaataatagaggttgatgtatctgaactcggaagtatatctatgaattctcaaaatgaagtatcaataagcagtacatgtacagtatttgcagagtctgaggttatatcacatttatctgaaaatgcaaaaattgaagatatagtggcaggtattcatacttcagtagcaaagagagtttctagcctagtaaaaagaataggagtacaaagaaatgtagttatggttggtggagttgctagaaatagtggtattgtaagagctatggcaagagaaatcaacacagaaattattgtacctgatatacctcaattaactggtgctttaggagcagcgttatatgcttttgatgaagcaaaagaatcacaaaaagaagtgaaaaatatataaaaagagggatgaaaatgtctgaaaaaaaagaagctagagtagtaattaatgatttattagctgaacaatatgcaaatgcatttaaagctaaagaagaaggaagacctgtaggttggtcaacatcagtatttcctcaagagttagcagaagtatttgacttaaacgtattatatccagaaaaccaagcagctggagtagcagctaaaaaaggttctttagaattatgtgaaatagctgaatctaaaggatattctattgacctatgtgcatatgcaagaacaaattttggtcttttagaaaatggtggatgtgaagctttggatatgccagctccagatttcctactttgctgtaacaatatatgtaatcaagttataaaatggtatgaaaatatttcaagagaattagatatacctttaataatgattgatacaactttcaataatgaagacgaagttactcaatcaagaatagattatattaaagctcaatttgaagaagctataaaacaactagaaattatatcaggaaagaaatttgaccctaagaagtttgaagaagtaatgaaaatatcagctgaaaacggaagactatggaagtattctatgagtttaccagcagattcttctccttctccaatgaatggatttgacttatttacttacatggctgtaatagtttgtgctagaggtaaaaaagaaactacagaagcatttaagttacttatagaagaattagaagacaacatgaaaactggtaaatcttctttcagaggggaagaaaaatacagaataatgatggaaggtataccttgttggccatatataggatacaagatgaaaacattagctaaatttggagttaacatgacaggtagtgtttacccacatgcttgggcattacaatatgaagttaatgatttagatggaatggcagtagcatatagtactatgtttaacaatgtaaacctagaccgtatgacaaaatatagagttgattctttagtagagggtaaatgtgatggagcattctatcatatgaacagaagctgtaaacttatgagtttaatacaatatgaaatgcaaagaagagcagctgaagaaactggattaccatatgctggatttgatggtgaccaagcagaccctagagctttcactaatgctcaatttgaaacaagaattcaaggtttagttgaagtaatggaagaaagaaaaaaacttaatagaggtgagatataatggaagctattttatctaaaatgaaagaagtagttgaaaatccaaatgcggctgtaaaaaaatataaaaatgaaactggtaaaaaagctataggttgtttcccagtttattgcccagaagaaattatacatgcagctggaatgcttccagttggtatatggggaggacaaacagaattagatttagctaaacaatatttccctgcatttgcatgttcaataatgcaatcatgtttagaatatggattaaaaggtgcttatgatgaattatctggagttattataccaggtatgtgtgatacactaatttgtttaggacaaaactggaaatcagcagtacctcatataaaatatatatcattagtacacccacaaaatagaaaacttgaagctggtgtaaaatacttaatcagtgagtacaaaggtgtaaaaagagaacttgaagaaatttgtggatatgaaatagaagaagcaaaaattcatgaaagtatagaagtttacaatgaacatagaaaaactatgagagactttgttgaagtagcttataaacattctaatactataaaaccatcaataagaagcttagtaattaaaagtgggttctttatgagaaaagaagaacatactgagctagtgaaagatttaatagcaaaattaaatgctatgccagaagaagtctgttctggaaaaaaagttttattaacaggtatattagctgattctaaagatatattagacattttagaagacaacaatatatcagttgtagctgacgacttagcacaagaaacaagacaattcagaacagatgtaccagcaggtgatgatgcgttagagagattagcaagacaatggtcaaacatagaaggatgttcattagcttatgaccctaagaaaaaacgtgggtcacttatagtagatgaagttaaaaagaaagatatagatggtgttatcttctgtatgatgaaattctgtgacccagaagaatacgattatcctttagttagaaaagatatagaagatagtggaatacctactttatatgttgaaatcgaccaacaaactcagaataatgaacaagccagaactcgtattcaaacttttgctgagatgatgagtttagcgtaagttcattaaaataaatttactataaaatatgaaaattggaggaagctatgttatataacaaagaacaagaacttttaagaaaagcagtaagagattttgttagtaaagaattagatactttaccagcagaaatggataaaacaggtgtaatgcctaaggaattaatcaaaaaattagctgatgcaaaatttataagcagtaatatcccagaagaatatggtggtgggggagcaggatatgtttcttacgctatagtaatggaagaaatagctagaagatgtgcttcaacagctacttttgttacagctggttcttctcttgcttcattaccaatactttacaatggtactgaagagcaaaaacaaaaatacttaaaaggtatagcaacaggtgaattaataggagcatttgggttaactgagccaggagctggttctgatgcaggtggacaacaaacaacagcagaattagttggagaccactatatattaaatggtagaaaaactttcataactaatggaccattctgtgatgtagctatagtaatagcagttacagatagaagtaaaggacttagaggaacatcagcgtttatagtagaaagtaaatgggatggtttctcaacaggagctcatgaagataagatgggtataagaggaactgaaacttctgacttaatatttgaaaacgttaaagttccaaaagaaaacttacttggaaaagaaggtcaaggatttaagatagcaatgggtactctagaagttggtagaataggtgttgctgccttagctctaggaatagctcaaggtgctttagatgaagctgttaaatatacaaaacaaagagttcaatttggtaagcctatagctaaattccaaaatactcaatttactatagctgacatggaaacaaaagtttgtgcagctagaggattagtttatgatgcagcacaaaagagagatgcaggaatgagagttgctcaagaatctgctatggctaaatactatgcatcagaaattgcaaatgaagttgcttataaagcattacaacttcacggtggatatggatttataaaagattatgaaatcgaaagaatgtacagagatgctagaatcgtatcaatatacgaaggaacatcagaagttcaaaaaatggtaatttcatcaaacgtattaaaataataaataatctaatgaaattggaggtatagactttgaaaatattagtttgcgtaaaacaagttccagatactaacgaagtaagaataaataaagaaacaggtactcttataagagatggagttccaagtatattaaacccagatgatgcaaatgcattagaggaagctttaaaaattaaagatgagcatgatgatgtaactataacagttataacaatgggacctcctcaagcagactttatgctaagagagtgtttagctatgggtgctgatgatgcaatattattaagtgatagagcatttggaggagctgatacttgggctacatcaaatactattgcagcgggaatatctaaagtaggtgactatgacataatatttgcaggaagacaagcaatagatggagatactgcacaagttggaccacaaattgcagagaaattagacattcctcaagttacatatgtacaagatttcaaaatagaaggaaaagatataatagttcaaagacaattagaagatggatacgaattaataaaagtaagtacacctgtacttttaacagcagtaaaagagttaaatacacctagatacatgtctgttgataaaatagtaaaagcatataaacatgatgtaaaagtttggacaattgatgatttagatgtaaataaagaagaagttggtttaaaagcatcaccaactaaagtatttagatcatttactcctgaaccaagaggaaaaggagaaatcttagaaggtaaagctgatgaaatagctagtaaaataataatcggtctaaaacaaaagcacattatataagttggaggagtacaaactatgaatgatataaaagatttaagttcttataaaaacgtatggatatttgcagaacaaagagaaggaaaaatagctccagtagttatagaattattaggagaaggaagaaaattagctaaagaagtagatgcagaactttgtgcaatattattaggaaaagatgttgatggattagctaaagaattaatcacttttggagctgacaaagtttatgttgcagatgatgctcttttagaaaaatatacaactgatgcatatacaaaagtaataaaagatgcaatagatgaaataaaaccagaaataatgcttttcggagcaactcatataggtagagacttagcacctagaatagcttcaagagttggaactggattaacagctgactgtactaagttagaaatagacccagaagataagaaaataaaacaaactcgtccagcatttggtggaaacataatggctacaatcatttgtccaaaccatagacctcaaatgtctacagttagacctggtgttatggataaagctgaaaaagacgaaacaagaactggtgaagttatagcattagactacaaaataactcaagatgatataagaactactgttttagaaacagttaaaactaagaaagatttagtatctcttacagatgcaaatgttatagtatcaggtggtttaggattaggtggaccagaaggatttgaaatgcttaagaaattagctgacaaattaggtggagtagttggttcttctcgtgcggctgttgatgctggatggatagaccattctcaccaagtaggtcaaacaggaactactgttaaaccaaacctatatatagcttgtggtatatcaggagcaatacaacatttagcaggtatgcaatcatcagatttcataattgctataaacaaaaacccagcagctccaattttagaaatcgctgactatggagtagttggagacttacatgaaatagttccaatgcttatagaaaaattagatagcgttgatgatttattagaagctataaaagcttaatagatacaaactatataaatattactgattgaataagtcttattagttagtaacataattattaaccctttgataagttattgctagtgtgtatttgtcagttattaaaaagtctgtttgaataaaattttataatacaagataatctggataatccttatatgtatattgcttacaaattgtgagttatattctgtaaggattatctttgtttttttaaataaatcttaaatttaattaaattgtattaaatagacaaataattactaaatatgtgataaaatacaattaaaagcaaaatgaaatttttaacaaactataatcattaaaattatatcttagttacgttttaatgaaataaactacttgaaaagacgaatattataaggagttgattatatgtgctgatggtatttattgtaagcaaacaataaattttgtatgtagttcaataaattacttaatgaaaggtgcgaatattaatggataataatttaatagggcttatagaacatgtagaaaatccagccattttatgtaaagaatcaggcgaaataatatactgtaatcatctaatagatagtatttttagttttctagatataaaaaagcctagaaatataaatgaattagattcaaattttgacaaaacagaaatactgacagatagtaaaaagaaaatagctttcagagagttaaggatgactgcacatatatacaatatgaaagataataataatgaaaataatatagtttatttatttgagaagtctctaatatctgataaagtaattgaagatataatagagcatatagatgaagttgttgttgtgtttaacaaagatggggtaattgaaaagatgaacactgtcagtgatgagatattaccttttaaaagaactgaggtacttggtagaaatataacagaccttgtgagacaaggattagttgaagaaccaataatattaaacatgcttaaagtgaagaaaaagatttatagaaatatcgtttacccagatgggaagcttattgcatatacggcagttccaagatgggattctaagggaaagcttacaggaggagtactaacagggagagatatttcaagggttattaagcttgaatctcagataaaatatagtgatatatcagaagacacagagtatataagtcaaagtaagattatggacaatataaaaaaagttgttaagagagctgcagcctcagattcttctatatttataaatggagaatcaggtgtaggaaaagaaataatagcaagaacaatatataagtatagttcaaggagagacaaaccttttatagctataaactgtggagctataccaaatgaattattagagtcagagttttttggatatgaagaaggttcttttactggagctaagaaaaaaggtaaaaagggactttttgaagaggcgaatggtggaactattttcttggatgagataggtgagttaccaatgcagatgcaaaaaaaattacttagggttatacaagaaaatactattactagaataggtggtagtaagcctataaaaatagatgttagatatataagtgctactaatatttctcatgaagaccttagaaataaccttaaatttagacaagatttgtactatagattaagtgttattccagtaaaaatacctcctcttagagaaagaaaagaggatatagtaccattagtaaattatttcttaaaactttacaatgaaaagtacaatagagaagtagaagtttcacctaaagttattgagttattagaagaatattcttggccaggaaacataagagaattaaaaaacatcattgaaagatttgtagtattatcagctaaaaatgtaattggagaagatgaatttaacatgctgataaatttagatatgattgataatgaaacagatgatttatcaccaatagtggtaaatggaattatgaatcttaatgatgcatataaaatagtggaccaaataatgataagtaaggctataaataagtatggttcaataacaaaggctgctgaagttataggtatatatccttctaccatccatagaaagataaagagtggacatattcacgtttagctgtcagtttaaaaagacaatataattaaaatattataagatacataattgatacaacttaaaagagatggcttaaaaataaatttaattactttaagtcatctcttttcttttataaatatttaaaagttatattagtttatagagttagcagaacctaaaacatcatctatcttgctttcaactacagcttgtatagcatctctaccagcaccaatgtattttcttgggtcaaattcttttggattttcagctaagaattttctgatagcagcagtcatagctagtcttaagtcagtatccatgtttattttacaaacagccatagaagatgcttttcttaacatatctacaggtacacctttagcaccagctatatttccaccaaattcattacatgtagcaacagcgttttggtcaacagcagatgcaccatgaagaactattgggaaacctggtaatttgctttggatttcttctagtatatcaaatcttaatttagcttctcctttgaatttgaaagcaccatgagaagttccaatagctattgctaatgaatcaacacctgttctttcaacgaactcaactgcctcagctggttgagtatacttgtgaacatcagaagtaacatcatcttctgttccagctagaacaccaagttctgcttcaacaacaacacctttagagtgtgcatattcaacagcttctttagttattctaacattttcttcaaagtcaaaatgagaaccatctatcataactgaagagaaaccagcatcaatacaagttttaatagcatccatatttggaccatggtctaagtgaagagctacatctacacctatttcatcagaagcagccttaaccatttcaactaatgtatgaggtccagcatatttaacagctgacatagaagcttgtatcataacataagaatttttagctttagcagcttttaaaacaccttgtaattgttctaagtcacttatgttaaatgcacctatagcaaatccaccttcgtaagcttttttaaacatttcttttgtagtaattaatgccattttaaactcctcctattaacttttaaaatttacccatcacttatattataacgttaaatcaaaaaaagtatatagtaaattgtaataactataaattacaagtataatgttaaatagaagacaataggattaaataaaataataaagaatataaataatttaggaaaattagctatataatgctaactataagggtaggaactaccttattagtttggagatactgataacaatagttgtcttgaccaagaagttaccacttcaaacgttatcgaagggaattaagtggatgataattcactaaaaatttaaaataaaggagataaactatgccacagataaaaataagaggaattaatgaaaatgatatatgtaaaataagtaaaaaaatgataaatgatttagttgaagctgtaaaatgtccaagagactactttgaaatagaatgtataaagtcagttgcaataagagatggtaaaatagcagatgtatatccttttgttgaagtagcttggtttgatagaggacaagaagtacaagatatagtagcaagaataataactgatagtataagaaataatttagatgtagaaagtatggatttagcatttacagtatttgaaaaagaaaaatattatgagaatggagagcatttttaatggctaaaaagcaacgtatagataaaattctttcaaatttaggttatggaagtagaagtgaaataaagaagtattgtaaacaagggtctgtagtagtaaatggaagtgaagtttcaaatccaggaactcaagtagacactgaaaatgatgagatattatttaatggagaagaagttatatatagagaatatatatatttgattaaaaaatagctacgtacactcgtgactttagtcatgagttagtagctaaaatagtcagcatatagggaaacttatatgtagagataggatagagcctatccaatactacttgaattgctggaaacccctaaagctaaccaaactaaaacataaggatgaaataaacctaagtgtgaaagttacgaaagtagaaaaaattggttagatggtataaggttaaaccctaagtactttaaaatgggcaatcagcaggtaagctccgaataggagaaacttcaacgactattcctcttgagggaagtacactacaagctatcggtagtggaagtgggtagaccttagcggataatgccgaaggataagatatagtctgtgcttgcatgaaagtgtaagaagttcataagagaactgcataggtagtagcgaacttatgtgaacgacaacctcaaaaatgataaaagttaagacttacggttcttaaatatgttatttaaaattaaatataaaaccttctaaataattgttttaaataattacatttgttaacattattataggtgattaataaattgttcaccacagcattatataatatattaaatatgataaaatcattaaaaagtgtatcaaaaaacaattaaagtgaggtgatagcagtggaaaaagcttataagtttagaatgtatccaaataaaaaacaacaagagttaattaacaaaacttttggatgttgtagatttgtatataataagtatcttgctaaaagaatagaagtttataaaaacgataaagaaacttttacttataaacagtgtagttctgatttgactaatttaaaaaaagaattaaaatggcttaaggaacctgacaaattttcactacaaaacgccttaaaagatttagataatgcatataaaaaattctttaaagaaaaagcaggatttcctaaatttaaatcaaagaaaattaatagattttcatataaaactaactttacaaatggaaacattatgtattgtggtcaacatataaaactacctaaacttggtatggttaagataagggataaacaagtacctaaagggagaatacttaatgccactatatctaaagaaccaagtggtagatattatgtatcattatgctgtactgatgtagatattgaagtatttgaaaatactaataatcagataggtttagatttaggaattaaagaattttgtatctcaagttgtggagaatttatagaaaatcctaagtatcttaagaagtcattaaacaagcttgctaaattacaaagagaattatcgagaaagacaatcggtagtttaaatagaaataaagcaagattaaaagttgcaagacttcaagaacatatagctaatcaaagaaatgattttctacaaaaactatctactaaattaataaaagagaatgatattatttgcatagaagatttacaagtaaagaatatgattaggaattgtaaactatctcgcttaatttctgatgtgtcatggtcagagtttattcgccaattagaatacaaggctaattggcatggtagacaaattgtaaaggtaggtaaattctttgcaagttcacaaatatgcaataaatgtgggtataaaaacgaggaagtgaaagacttaagtataagagaatggatttgtcctagttgtaatgaaactcacgatagagatataaatgcaagtataaatatattaaaagaaggattaagactaataacaactcaaaataaataacttatgtaagaaccgtaggaactacggggatagcctgtggagaattagtaagacatattttagtatgcaaaattctgtgaagcaggaaccctgtgactttagtcatgggaggttcaggatgaataaacctgatggatatatatcagcaactacagataaatatgacccaacagtattagatttaattgatttatcatacttagcttttgaaccatttcctgttggaaggttagataaagacacagagggattattagttttaactaatgatggaaagctttctcatagagttttatctcctaagaagcatgtgcctaagacttattatgcaaaaattgatggagtagttactgaagaagatgtagaagcttttttagaaggtgtagtgcttgatgacggatataaaactatgccatcacagttaaatatattaaaaagtgatgatgaatcagaaatagagcttacaatacatgaaggtaagtttcaccaagtaaaaagaatgtttgaaagcgtaggcaaaaaagtagtatacttaaaaagattgtctatgggcaatttaaaattggatgaaagtttagagttaggtgagtatagagagttaacagatgaagaagtaaaattgattgaagaaagataataaagatactatagtaaattggaggaatgtctgtgaagaaaaaagatgttatagaatttgaagtagataaaatggaatttggtggtacatctttaagtcaagttggagatagagttatccatatgaagggtggaataagtggtcaaaaggtgagagctggagttaaaaaagttagaagtaagaaagctgaagttaagatgatagaattattagagaactcaccacttgaaactgaagaaacttgcaagcactttagagagtgtggaggatgtacactattgtctgtgccatatgaaaaacaattagaaataaaagaaaaacaagttatggatttatttttaaagcaagatttatttggatttcagtttttagggatagaaggaagtccagaaaacaaatattatagaaataagatggaatatacttttggagatgaagtaaaaaatggacctttgacattaggtcttcataaaaaaggaaagcatatagatatacaaactgttgaggagtgtatgttggttgatgaagacttctcaaagatattagtttctagtgtagagtttttcaatgaaaaaaagcttccttattatagaacaatgaatcacaaaggatatttgagacatcttgtagttagaaaagggattcatactaatgagattatggttaatatagtaacttcttctcaagaagattttgatatgaatgagtttaaagatatgcttttagggattgatttaaaggctgagttagtaggtgtacttcatactattaatgatggtttagcagatgcagtccaatgtgatgagttaagagtattgtatggaagagattatatacaagaagaaattttaggtcttaagtttaagatttcaccattttcgtttttccaaaccaatactaagggagctgaggttctttatagtattgctagggattttattggagattacaatgataaggttgtatttgacttgtatagtggtactgggtctattggacaggttatggctggtgctgctaagaaagtgtatggtattgagatagttgaggaagctgttgttgctgctaatgagaatgctaagttgaatggacttactaattgtgagtttattgctggggatgtggctaaggttgttaaggatttaaaggacaagcctgatttgattattgttgaccctcctagaccaggcattcataaggatgctattagggatatttgtggatttggtgctaaggagattgtttatatttcttgtaatcctaagtctttggttgttgatttggttgattttaaggggtatggttatgagattaagatggttaagtgtatggatatgttcccaaatacgccacattgtgagactgtagttaaacttattagagaataacagggtttcagacttttatattgtgtcttaaaagtagatttgccacctatttgccaccataattatttttgggtggcaaatttattctacaatgatttcaaaaatatttaccatctggtttctcatgttattagttacatgtaaatatgtatccatagttgttgaagttttagcatgtccgagtatatgctggatatcttttatattagtaccattttctaataacatagtatcagggtttttaaaataaagtgtgtattcttctagagtagtgataattaaaatatcaaatatcactatacaaaggaaagtgcaccctttttatgtttagcaaaaacgaaatattaaaaaaacttattgaagaatatgatgtcaaaacaactacagatattcaagatatgctaaaagatttatttacaaatacaattcatcaaatatttccattgtcgaattttaacggtttaaacataatatattgactgatataataaaatcatagaatattttagggggaaatagattatgtttaagaaaaagttaatagctgttgcaatgagtataactatgattagtgtagggagcttttcgtatgctcattcaggaagaactgattcatcaggaggtcatcgtgataataaaaataaatctggattaggaagttatcactatcattgtggtggttatccagcccatttacataataatggtggttgtccttatactggaggaggaagcagttctggaacaacaacttcggttaataatgaagaaaagcaaaagaggtctgttggagaaaaaggatataatcaagggtatgaagatgggtataaaggaaattatagttcatcaaattatagtggagattatagtgatacatatgaatcaaagtactcagaaggatatgaaaaaggtaaggctaaattagaagaggaagaaaaggtggctaaagagactggatataatttagggcttacaggtgctaaatctaataatacatatgaaaaagaagttttaaaaaatgcttatgataccggatattcaactggatacaatgaatataagactaaaaagatagaagaatataaagctaaagggatagaggatagcaataaagataaagaaaaaatgacatttgaagaaaacatagattctgaatttatagatgcttataataatgcttatgacgaaatacaagaacaattaaaaaatgattacactactcaaggatttgagagtgctatcaaaggagaaagatttgacacatcaactataggtaatgttaaatatgctaattggtttaaagaaggatatgataatggtaaggttaagttacctaaagcaaaagaaagtgtatataatcaaggttacaatgaagaagattttagtataccatatgaaatgaagtctattgaaactaagttaaaaggtgtatatgatgaaggtttagaaaaaagagaagaagagaaaagtagaaatgctacttatggggttggagctggaacagcagctgtagttgctggagtagtatataaaaataaaaaacgtaaaaagatatagatgctagatataccaatgatgacaagtgtataacaaatataattttaagtataaatatttaaaatatagaagggaaggttatatctatgggatttaactttaggaaaagcataaatctaggaggaggactcaaattaaatttaggtaagaagagtgtaggtataagtgctggtgttaaaggtgctagagtgtcagttaattcaaaaggaagaaaatcagctacattgagtatacctggaactggaatatcatatacaaaaactagtacaaagaaacgtaaacctaaataaatatttgatatactaagaaatagactgttacaaatagtctattttttagtatatagatttaaaaagtgacaaaattttgaaatataaactaatttcataaaggaaaatattcttttatgtagaattataatatttaagtaatattataaaatttataggaggatttcattatgaaattaagcaaaacactattggcaatagggatgtctgtttcattattgattgctagttgtccaacatcaaacgctcttagttctattaattcaataaaaggtacaaataagtatgaaacagcaggtttaatagcagataaacaaaattatgatattgcaatacttattaattctgaaaatggattatctgatggattgtcagcaagtggattgtcaggagctaaaaatgccccaatattgttaactaagaaagatacaatcccttcagaaacattaaaaagattagaaaaggtaaaagaagtatatctaattggaggaaaaaattcgataggagcatcagttcagaaaatattaagtgataaaaaaataagcataaatagaataagtggaactgatagaatagatacaagtcataaagttgcaaaagaaataggaagagtaagtacggttaaaaaagtaatattaactaatgcttttaaaggcgaaccagatgctatgagtgttgcttctatagcagttagagataaatctccaatagtattaactgatggaaatactacaagttttgctacagatggattagaaacttatgcaattggtggaaaagtcagtatgagtgataagttaataaatgaaactaaagcaacaagaataggtggagtagatagatacgatacaaataaacaaataataaataaattttataatggctcaaaagaattttacatagcaagtgggactgatttagtttattctttagttggttctacaattgcacaaaaaacacctatagtgttagttggaaatggaagtaataagagtatattaaaaaatgcaagtaaaataactgctattggaaatattgatgatgttattataaaacaatgtttaaatataactaataatgttggggattcaaatacaggtattgtaaaagatactaattcaaataatacaaacaaaccaagtaatgagcctagctctaataatcctggattaactgataaaagtacagtatatgtaactcctaatggaaaatcatatcatctaacaaaaaattgttctacactaaaaagaagtaaaacaataaataaagtaacattaaaacaagctaagtcacaaggtaaaatagacccttgtaatgtttgtgtaaaataatgtattagccaaatatatattaaaaaagacaattaattaagattgtcttttttattgaagaaatataaatttatattatgtattattaaaaagaaaattattaattataaaaaataataataaagacgataagtattaaaattttatgtttccaatatttatgatataattaatatggcaaggaataaatatttgaaaaagctatgagtggtgtttccatggaagtttcttcactttcttatgagaggaggtgaaaactatggaaaatctaatgatgagtattataactggtgttatagccagttacatttacgataaattaaagagccactctgaccaatgaactatacccactgttttatacagttaaaacatgtaaaagtggttataaagtactagtgtcaatcattagtactttttttattatattcatataattaatagctatattttaaagtttactatctaaaaaatagcacgtcaaataaaaccctagatatttaaatttttttagagctacttaaaataaattatgctatctctgtacttaaatatttcctaaattcaagtggagacatagaatttaatctcttttgatatctaaaattattatagtaatatatataatcatctattgctttgactaattgttcgtatgtatcaaatttccttaaatagtacatttccacttttaaaattccccaaaatccttccataggagcattgtcaatacaatgaccaactctcgacatactttgtatcatgccttgtgttaaaagttttgatttaaacaccctgctagtatactgatagcctctatcactatgaaagataggttttgcatttggatatacttctattgctttattaaaagtttcgaatactaagttattgttatttgattttccaataacatatgaaactatgcttctatcacctaaatccagaattgcacttaaataagcctttgtcccgttggttaatttaaattcagttacatctgttaaccatttttgagaagttttatctgcactaaattttctatttaatacattttcagcaattacttctggtgtacatttaacataactaaatttcttttttctacaaatagaccttaagcctacggctctcattagtctgtacactctcttgtgattgacattaagtttatactctctgtttaactgcaaggtcatccttaaagagccaaaaactcccttcttttcttcatatatcttagttatcaaagttgctaatttaatgttttcaagttctaaattacttttatctcgattgagccatttatagtatccagaacgatttactttagcgatttcacataattgtataagcgaagcttttttttcattgaataaggattgaatcgctttatatttatcttcattcttggatagtgtaattaccaccctctttctatgatttttaacttttttaagaattcattctccagttgtaatttgtgtttttctgcttttacaattttcaattccaactttatttcatctaattgagttaactcatcttctttttttgatttacctcttcggtcttctaaagcatctatcccattttctttatatttaagagtccatcttctaacttggctgtatgaaacaaagtatttttttgctattaaattgtaattaagaccatgttcaatacaatctttaacaatttcagctctttcatctaatgttgtttttctagtctccataaagagtcctcccttcggggtttcttttatcaccttatgaagattatactctttaacccaagcttttagtggatgaactgatctcattttatatttttttgagatagtatcataagatccttccccatttagataagattctatagcatttaatttaaactctttagaatagcatgatttgtgactttgttttattaaaccatcatttccaaaagtttcataatttcgcatccactctctgaatgtacgttttccaatatttaattcttccattatttttattactgaattttcaccctttaaatatgattcaattgcttcgattttttgctctgatgatactttagttttagacataacaaaaccctcctagtttcagacagttttacatatttcaactgtctcctaagaggggtatagttcacaactaagagtggctgggaacttaatataaagttccagaaaagtaaatcttcaaaataatttattgaaggaaacatcactcaaagttaagtaaaatatgtttccttgcttttattatatcacaaattaaaaatattaacacaaaattttgtgaatatatacttattattgttctaaaaaaatatgtaaataattgatttgatttcatagaattattgttgtaatatttagttaaatatacacaatctcaattaaagaagataagtattataaattcatatcaaaaaaatacataaacttttaagttataattttataaaaagtcttttagtatcattatttcaagaggaattaacatatgaaaaaataacttcattagaaaagtggataaaaaactggtaagaagatgactaaagattacatatactattacttaaattaaaaatttaatataatttataatgtatacaatttattataaaaaatttaattttaattttctatttttgatactataatatataatcttgataatttaattaaaaatctagattttacataccaaactggtttcttatttcgctatctttacttatgaactcatatattcctataaaggttattttagaaaaagttggttatttaaacattaataccacaatttctatagattgtttgttgaataatctataattatattatggactaaaaaatccaatgagttaatttattgtttttttatatttgagagattacaacttattagtttgtatatctctttttttaataaaatcaataatatataaaactattggcatatttaatgacaattcaaatattgtatataaccataatgaaagatatataaataaaattttaaatatacttaaaaatatattaatataatgtacataaaaaatatcataaatatatgataagataaatacaatagcaatattttattaattttttgggtttttatatatttaggtactggggtgatatagttgaaccaagagatattttttaaaataatgaatgaaatattggaaaatattgatgaaggggtacattttgttaataaagacgggaaaactataatctacaataattctgtacaaaaaatggaaaaaatgaacagacacgatattttagccaattcattttttgatatagtcaacaaaatgaaaataaacaggagtacactattagaagttttggaaaaaagggaagttatcaaagacaatattcaaaaatatctggacaaaaatggaaaagagataacagcaattaatactacaataccaattgatattaaaggcgagtttgtaggggcacttgaaatatcaaagaatatgacaacgatagaaaatttactaaacagaaattataaaaaaaatttagtcaataaagttagtagtagacaaaaaaagggttatgaatttgatgatattttaggggaaagtaatttgattaaagaagcaatagaaaaatctaagaaagcttgcaagtctgatgcttcagtatttatatacggtgaaactggaacgggtaaagagttatttagccagtccattcattatggaagtaataggagaaactatccatttatagcacaaaattgtgcggctttgccggaatcactattcgaaggtatcctttttggaactagcaagggaggatttacaggagcaatagataggccaggcttatttgaacaagctaacaaagggacattgttattggatgagataaattccatgcctattatgttacaggctaaactattaagggttttacaagaaggttatgtaagaagggttggaggaactaaggatatacctatagatgtaagaattattgcaacgacaaatgaaagtccaaaggtaattttaaacgagcataaaatgcgaaaagatttatattataggcttaacataattcatataaaaattcctcctcttagagatagaaaagaggacatacttctattgtgcaaaaaatttatttcaaagtataataaaaagttaaataaaaaagtggtaggaatttcagatgaagctattaaaattttaaaaaattacgattggcaaggtaacataagagagctagaaaacataatttattgtactatgagtatgatggaagatgaggtacaaatagaaacaagtatgattaatctaaacgactattacaatcttaaagagaataaagagagtaacaattattctttaaacgatttggagggcaaaacacttagtaagattatcagtgagatagaagaaaagtatatatatgaatcattagaaaaggcatcgtacaatataactaaagctgcatcaattttaggtatgaataggcaaaatttacagtataaaataaaaaaatataatatcaaaatattataaataagcaagataaaaaaacaaaatagaagtaaaataaaaaagcaaaatataggagcaaaattattataaaagagcaaaatattttgctcttttttttatttctcataagaaatattattttttatttatgaaaatacataataaaataattatagtttcaacgttccaataaatatttactttaattttaaagttggcacgatttatgctttaactaattattgagaatatataaatttttaggagggtgtatatatgagaaaagtaagagtaggaatatggggatttggagctatgggaataggtatggctaatatgattctaaagaaagaaggtatagaaatagtatctgtttgtagtagaagtacttcagggaaaagtatgtatgatgttttaggaattgaaagaggagaaagaccagaagttattatcaataaaaattatgaagaagtttttagagaaaaaagtgtagatgttgttttgttagcaactgattcatttactaaaaaggcttttgataaaataattttcttattaaatagaaaaataaatgttatatcaacagcagaacaaatggcatatccacaagctgatgatgcagatttagctaaaaaaatggatgaagttgcaaaggaaaatggagtaagtatacttggaacaggaataaatccaggatttgtattagatttactagtattggcactttcaggtacttgtgaagaagttactagtataaaagctaagagagtaaatgatttatctccatttggaaaatctgttatggaggaacaaggtgttggagtaacaagggaagaatttataaaaggtgtagaagataagactatagcaggtcatgtaggttttgtagaatcaataaatatgatagctgatggattaggttggaaattagataagatagaacaaacaaaagagccaataatgactacagtagatagaaaatctaaatacggagaggcattggctggaaatgttgctggttgtagacaatgtggatatggatatgtaaatggagacgttttaattgaaatggagcatccacaacagataataccagaagtagaaggtattaaaacaggagactatgtatcaataaaaggtataccaaacattgatttacaaataaatcctgaaatacctggaggagtaggtacttatgcaatgatagtaaactctattccattaataataaatgctagaccaggtcttaaaactatgttggatataccagtgcctagagcaataatgggagacataagaaatcagatagaagttgaattggaagaagaatcaaaggctaattagtaagataacagttagctaattggtaaaataatgtttaatttaaaataacagtaaattaattagtaaggaatagtcaattaataaggggatgaaaaaatggatgctaaaattaatgattgggttattatacacaatatagtattgactccagaagaaagagctccacaagttccagaggatactaagaaagtatccttagaaatgtgggttaaaggttttatacaaagtgatgcttctataggcgacttagtagaagttaaaacaattacaggtagacttgtaaaaggtaatttacttaaagtaaatccatattatactcatgattatggtaaatgtataccagagttactccaaataggaatccaagctaaagaaatattatttggaggtgtatataatgaataattcaacatcaataaaagatatgagttatcaagctgttatgggaagaaataacgaaataatgaaaaatgcaatcggattggattattcttcttttgaacaagagggaatagggtttgattatgagaaaatgatgagtgaaacaggatatacattacaagatattgaagcaattcaatcacagtatgctgttggaaatactcctctaatagagcttaaaaatttgactaaattagctagaaaatgtgctaaagaaggtaaaggagctaaaatatttgtaaaagatgaagcaatgaatgcatctggtagttttaaagcaagaagagcagctactgcagtatatcatgccaaacaaatgggatataaaggtgtaatagcagctaccagtggtaactatggtgcagctgtagcatcacaagcggcaatgcagggattaaaatgtataatagttcaagaatgttatgattctaatggtgtaggtcaacctgaaattatagaaaaagcacgaaaatgtgaggcatatggagcagaagttgttcagttaactgttggaccagagttattttatacgttcttagttttattagaagaaacaggctattttaacgcatcattatattcaccatttggaattgcaggtgtagaaactttaggttatgagttagctatccaatttagagaaaagtataaaaaagaccctgatatagttgtttgtacaaatgcaggtggtggtaatcttactggaactgcaagaggattgataaaagctggttccattaatactaaagtagtaggagcaagtgtagatttaaaaggattacacatggctagtgataatcaatttaataaaaaatcatttacaacaggacatacaggttttgggataccatactgtacatggcctgataggtcagatgtacctaggtctgcagctagaccacttagatatatggatagatatgtattagtaaaacaaggagaagttttttatacaactgaattattggcacagctagaaggtatagaaagaggtccagcaggaaatacatctttagcagcagcattctctttagctcaagagttagatgaggataaagttatagtggtacaagaaacagaatatacaggcgcaggtaaacatatatgtccacagcttacttttgcaagagaaaatggaatagatataaaatttggaaatccaagagaagaaattgcaggagtaaacttaatattaccagaaagaccagaattattgaaatgtgttgatattgatatgaataaaataagaaagtcatttataaaaaattgcatatctaataatcacattgataatattgataagctaagtaatcgagatatagaatttttaatggaagaagtaaaaagttcaagagattttgttgttgatgtattaaataatttatagtaattattgtttttttatttaatataaaataaaaattcggaaaattctattaaatcaatgcgaatggaggaatgttcatgaaaaaaagagaggatgattttgaagttagaagaaaacatcttcaagaactgagtgatgatgagttaaaagaaaggttttggaatttagctacccagatagtagaaccaatgatagaacttggtaaaaagaatacaacaccatcaatagaaaggtctgtcttgttgagaatgggattttcttctcttgaagtaaaacctattttagaaggggttatggaaagaggtcttataggtaaaggagcagggcatgtagtttataaattggctaaatctaaaaatataacggttagagaagcaggtttgttattagttaagggtgaatattgggatgaagttacatgtttatttagagaaggggtagaatcatgttaaaggaaaataaaaaattggatatagactatatattaaaagatttggataaatataaaccaaaacgaagaggttgggtttggagagaacacttggaaaatcttgaaatgggaccttttaaatataaagactgtacaaaacctttaaagaagagtgtagggctaccatcatctaagtatttcaataatatagaccctcaaccaagtccagttattactactgaaatagcttctggtagatttgaggatgatataagaagaatgagaatggcagctcatcatggagctgaccatctaatggttatcagaactgctggacaatcacattttgatgggcttatagaaggaactccacaaggtataggtggagttccaataacaagaaaacaagtaagagctcaaaggaaggctcttgattttatagaagaagaagttggtagacctattaattaccattcatatgtaagtggtgttgctggtcctgaagtagcagtaatgtttgctgaggaaggagtcaatggagcacatcaagacccacaatataatgttctgtataggaatataaacatggtaaggtcttttgtagatgcttgtgaggcaaagaaaataatggcttttgccaatatagctcaaattgatggagcacataatgctaatgctactgctagagaagcatggaaggtaatgcctgaacttatggttcaacacgctttaaactctatattctcagaaaaaataggtatagataaaagtaatatatgcttatcaacagttccaccaacagcacctccagcaccatgtttaagaatagacttaccttacgctgttgcacttagagaattatttagtgattataagatgagagctcaaatgaatactaaatatatggaatcatcaactagagaagcaacagttactcatgtattaaacttattaacatcagtattaactagagctgacatacaatcaactataacacctgatgaaggtagaaatgtaccttggcatatatacaatatagaagcatgtgatacagcaaagcaagctttagttggtatggatgggcttatggatatgatagaacttaaagatgtcggtgaattaagagacaaagcaagagaacttaaagaaagagctgtattatatatggaagaaatatctgaagttggtggatattttgaatctgtggaacaaggattttttgttgattctggaaattatccagaaagaaatggtgatggaatatctagaaaaataaaaggtggagttggtgaaggtactgtttatgaaagagaagaagattatttagcacctgtaactgctcactttggatacaataatgtagctcaatatgatgaaaatgctatagataatccatcaatgttaatagatggatgtacatttgaaaatccagacaaaataatatatattgatgagcttgacgattttgataatgtagaaaatagactaaaagaatcatatgagtacagaaatggaactaaaattaagcctgaaatggaatggtgtgcagatggaattgtaatgataacaatgatgcttcctactgataaaagaacagcagagtttgcagctttggaatttgtcaaaaaaatgaacttacaagaaattgaggtcataagtagagaagttatgcatgaatctgaagggactagaatagaagtgaaaggaagagttccgtttgatatagatttaaacaatttagtaataccagaagaacctaaggtactaactgatgaagaaataagagcagatatagaagaaaaacctatgaaaatagtttcagctacggttggagaagatgaacattcagttggtttaagagaaataatagatataaaacatggaggtattgaaaaatatggcatagaatgccactatctagggacttctgtacctgtagaaaaattggtagatgcagcgattgaactgaatgcagatgcaatacttgcatctacaataataagtcatgatgatattcactataaaaacatgaaaaaattacacgattattgtgtagaaaaaggtataagagataaagtaatgattgcgtgtggaggaacacaagtaacacctgaaatagctgttgaacaaggcatcgatgctggatttggaagaaacagcaaaggcatacatgtagccactttcttagttgaaaaaagaagagaaatgagtaataaataatggaaaatagcaaagtttctttaaaaatagatgtgttggtagctgaaattggaagtactactacagtggtaaacgctttccacgatattaatactaacaatcctatatttttgggtcaaggtcaagctccaacaacagtgtttgaaggtggcgatgtaagaaatggcttatcaggtgctattaaagatttagctaataaattatctgtagatgatatagagtataatgatatgtttgcaacttctagtgcagctggtggattaaaaatgactgttcatggattagtctatgatatgacagtaaaagcagctaaagaagcagctttaggggctggagctgttattcgtcaaataacatcaggtagaattaaaagaactgatttaaataaaataaaagaaataaacccaaacataattttaatagctggtggagtcgattatggagaaagagatacagctatttataatgcagaaatgatagcttctatgaatctaggcataccagttatatatgctggtaatgttgaaaatcaagaggaaataaggttaatatttgaagatactaattataagctttatataactgaaaatgtataccctaaaatagatttattgaatatagaacctacaagaagaatcattcaaagtgtatttgaagaacacataactacagcaccaggaatgaaatacattaaagaaatggttaatgaaaatattactccaaccccaggagctgtaatggaagcttctaaacttttatataaaaatattggagatttattaactttggatgtaggtggagcaactactgatgtacattctgttacagatggaagtgactatattaataaaattttggttaatcctgaacctactgcaaagagaagtgttgagggggatttaggtgtatatgtaaatatgaagaatatagtagaagttataggtaaagaaaacttacaaagtgaactatatatagatattgatgcagtaatagagaattatcctccaataccaaaatcaaaagaagaaatattatttgttgagaggttgacaaaagaagctgttgttaaagctatgctaagacattcaggaaaaataagaaatatctatggaacaactggaaaagtcaaaattgcagaagggaaagatttaacagaagtaagatatatagttggtacagggggagcacttactaggctccctagtagaattgaaatattagataatatgctcaaatacaataaaaataatgaattactatttccaaaggaaaaaacaaagatattaatagataatgactatattatggcatctatgggtgttttatctaaaaaatatgaagaagcatctcttaagctcctgttaaaaagtttgaattttgaggaggaaagattatgtatcctaggttagaaatagatatagaaaagttaaagcataatgcaaaattaatttcgcagatgtgtcatgaaagaagtattaagatatcttttgttactaaatcattttgtgcacaaaaagaaatagtagaagaaatatgtagtgaaggaatagaccatatagcagattcaagaatacaaaacttaaaaaaattacaagatataaatctacctaagatattgattagaatcccaatgttaagtgaattagaagaagttatcaattattgcgatattagttttaactcagaattagaaacaataaagaaattaaatgaattatgtgaaagtaaaaatattattcataagatagttcttatgtttgacttaggcgatttacgagaaggatacttttatgaagaagacttttttaataatgtaagagagatagtaagattaaaaaatattgaaataattggtatagctacaaacttaacctgttatggagctattataccatctagggaaaatataggcagactggtaagtatagcaaaaagaatggaagaaaaatttggaataaatctagaaatagtatctggaggtaattcaagttctattcatctgttgataaataataatatgccagaaggtattactaatttgagaataggcgagtccattctacttggtagagaaacggcatacggtgaaaatataaatggaacatatcaagatgcatttaaattaatatgccaagtagttgaatgtaaagaaaaaccatcagttcctattggagaaataggagttgatgcctttagaaataaacctgtttatgaagataagggaatcttaaaaagggcaatcatagctataggtaaacaagatataaatattgactctttaattccaatagacactgatataaaaatattaggggcaagttcagaccacatgatactagatgtaagtaacacaaaatatgattataaattaggtgacaatttagaatttttattaacttatgggggtatcatgtcatctagtacaagcaaatatgtttcaaaaaaaattatagtgtagtgtttaaataattaggaggaaactattttatgaaagagcgagaatgtagaaaagcaagtctgtttgatgcaatgataccaattacttgtttgatattatttttaagtctaggagtattagtgtatggttcatcacctcatgtaccactaataggagcagcagcagtagcaggacttgtggctgtatatagacttggatttaaatggaaagagttagaattaagtatgtttaatagtataaagatggcaatgcaagcaatcttaatcataattataataggcgtacttataggaacttggatagtaagtggagtagttccatgtatgatttactggggactaaaaattttatcaccaaatatttttttagtagcatcaacattagtctgtgcaatagtatctcttgcgacaggttcatcttggagcacaatgggtacagtaggagtagctcttttaggaattggtcaaagtttaggtatgccaattggattaatcgtaggttctataatatctggagcttactttggagataaactatcacctttatctgaaacgactaacttagctccagcaatggcaggaacagatttgtttacacatataaaatatatgttatattcgactataccatcattattaatttgtttagtaatttatggtgtaattggaatgaagtattcaggtcaagcactagatataaaacaaatagaattaattaggtctacattagattctacatttaatactttatcaccagtattattattagctccagcaatagtaattggattagttgtatttaaagttcctgctataccagggcttatagtaggtgctgtattgggagtattgtttgcagtagtttttcaaggagaatctatgaatacgatattagatgcagcacaaaatggatatgtttcgtcaacacaaatacaggaggtagatgctttattatctaaaggtgggattatgaatatgatgtccactgtatccttaacaatatgcgctttatctcttggaggtattttagaaaaaacaggtatgcttgaagtagtagcatcttctttactaagattagcaaagggtgtatttggaacagtattatgtactatggtaacttgtacaattaccaatataatagcaggtgaacaatatctatctatagttataccaggaagaatgtataataaggaatataaaaagagaggtatacatcctaagatgttgtcgagagctttagaagatagcggaactttaacttctccattagtaccatggaatacatgcggggcgtatataacagcaacattaggtgtatctgcactaacatatggtccatacgctttattaaatattataaatccaatagtatctttagtattaattgcatgtaagtttaaaatagcaagaatagaagatgaacctgaaacttgtttaaattttgatgtttgataatagataacttatgtaagaacgtaggaactagggggggagcctgtggggaattagtaagacatattttagtgtgcgaaattctataaatcagtaatcttgtgactttagccatgggaggttcagattagtaaatttatagttttatattagtctatactttgatcttttaattgtttgtataaattttttatagaaaaagatttcttttagacttgcctaaaaattaggcaagtcttttaagtatgttctgattataagagcactgtgtgacaagaatgatgagattatttttgctatactttcgatataagaaatggaaggaggttatgttttatatttatatgaaataattagttacacagtgaattttcgtataatttggtataaaaagattagaaatgaaaataaagtaatggaggaataaaatgactagaatatccaatataacaatagctgaacaatctgagtactgttttttggcaatacgaaaaacaattgactttatggtagagttttcagagttttcaaaacaaagttttgaaaaaatttctaaatatctggaggagagaggaattttatcttcaggagcaccgattgtatgttttcataacatggatttagcaaaattggatgttgaagtagggtttcctgtagccacttatatagatgggaaaaatgagattctacaaaggattgttcctgcacagaaaataataactgcaattgatttaggaccttatgaattacaagaccctactttagaagacttattttcatgggcaaatagcaatggatataaacttcatggcgatatatattaccagtatttaaatgatatcaatcgtccagctagtgaatatcttacgaaaatgatgttacccattatatagaaagttaaagattatcgtttgttagttgataattagaagaacatttaatgctactgcataaattttatcctaaataatatcaaggtgatttaatttatgtattctaatgtaactgtagataatcaatttataactaacttagtgtaatttagatttaatttattattctaatgtaaccccaatatattgttaaggtctacttaagatgctcaaaaggctatgcttaatttattgttatataatttgtagagtggtataatttagaagtgatactatatagatatatagggggaaaatatgaaaatatatgatatattaacacgtttttatattcaagatatagaaaaagccatacctttttatgagaatcttttaaaagaaaaatgttctttgcgtttttcttataaagaagttgggttggaattagcgcaaataggaaatgttttactattatctggttctgatgatgctcttaaaccatttatagaaacaaaatctacttttatggttgattctgttgatgaatggagaagttatctattggataatggagcagttgtagtaagagataagaaaaaagttcctacaggatataatatgacattgagacatccagatggtacaattatagaatatgttcaacatacaaagcaggattagttaaaaatagattttactactgagcaactaattagaatctattcttagacgtacaatttattatttttggtattaatagattataagtcaaattataatatttcaaaatagaatagaaatttatttacataaaagagagtgtttaaaaatgaactttttagttcacgaagcactcctttttgtatgaaatcaaatacatcaatatataaaacaaactgatgaagagcttaaattaaaataaaaagattcataacaggaccccattaaactttaagatagggtaagtttgtaatcatattaaataattgtaaaaagctgtttttagtcgtataatataaatatttatcatttaattaaggaatctaaaaggaatctaataagaagaaaataataaataactttttagatttactaaatgaaaaattattgaaaattaaaggattagagtctttaatcagaaagtaaaaagtaatatattaaatttatgaattgaaaacttaaacaacaaatttgtttataaaatagcaagattcattaaatataactaagtaataattgatataatgttgcatggataaaaggagggaagctgcaatgtcttacaaagtaattaatgtcataactgctattgactatatagaggagcatttatcagaaaagctggatttagatataattgctaatgctgttcattactcaaaatatcacctgcatagaactttcacaacttctgttggtctaacaatgcatgattacataaagcggagaaagttgacagaagcagcaaaattattggtattttcaaagaaaccaattattgaaattgcattgatagctggatatgaaagtcaacaggcattcacttctatatttaaagctatgtataaaaaatctccaaataaatataggaaagaacaagaattttatcctttgcagctaagatttgttttgaaaaaagataacctattttcaaagaatgtactagagttggaaaaagaaattaaacttgcaagtatgtctgacataccattatggatgaatttagtgagattagtcatagatggatttccaaatttgcaagaggaagaatatatatatcaattagaacagtatattttagaagaaagagctttaatattaaaacttaataatgtcgctattgcaaatatggtgtttaatagagaaactagaagtattgatttttttggaatacatccacagtatcgtaattcagacattgcacaagtgtttttgaagaaagttattgaagatttcttgatagatacagatatctcaattactacctttcgagagggtgacaaagctgatacaggacatagagatatgataaagaagttggggtttgcagaagcagagttgcttgtggaatttggatatcctactcaaaaatttattcttccttgtgtagaagaaagagataatagacaaaattaattgtagattaaatgcaaagtttaccacatattttttgtttgaattattttatatataagagtatttctgcttttaatgtattttgcttgtaagtgtacttatggtaataaatatagaaagatttagttttttaaaaaaagaactttaaagctaaaaagctaacatttaagttaaatagcaagaatgattaaaaactccaaaacacaattaagtataatgattcagtgtaagtacttaattaacaaaggaggatttaaatgtctgaaaataaacaagtagtaaattgcgatattattgcatccaattctaaacataatatgtgtgaacatgatgtagagttattaactttttttccagatgagattgcacatctaatagagataaataacaagctagacaatgcttttaagaaagctgaaaatcttgttgacaagcttgataaggattatatggacgctaaaatgtatatggtaaaaaatcgtggtgaaatagacccacatgaaatgtttcaaaatgaacaaggactaaaacaaatagataactatggggcttttatggtaaaagttcgagataagattaataaaatcaaagattctccatactttgctagaatagattttaggctgaaagatatggatgatgaatctaagtattatattggtagatttgcatttgattatgaagatgagcttataatacttgactggcgttctccaattgccagtatgttttatgattatgaaatcggaaaagctggatatgatgctccaataggatgggtggatggagaaataacaagaaaacgacaatttaaaattaaaaatggaaaattggaatatgcactagaaagttccattaatatacaagatgatattcttcaaaaagaacttagtcacacttcagatgaaaaaatgaagtcaatcatttcaacaatacaaaaggaacaaaatcaaattattagaaatgataaagctgatacactgattattcaaggggtagctggttctgggaaaacatctatagcattacacagaattgcttttcttctttatcgatttaaagataaaatatcagcaaataatgtaattatcctatcacctaataaagtctttggagactatatttccaatgtccttcctgagcttggagaagaaccattatgtgaattaagttttgaaaatatagcagaggtacaattagatagagttattaattttgaaagtgagaaagacccattagaaataaatgatgctaaatggtctgaaagagtgcgttttaaatctacacttgattttgtaaaacttattgatgattatataaaacaaatgccaaataagatttttattccaaaagactacacttttggaagttttacagctaaaagtgactggatacagagtagatttgaggcatataacagatatccagttaagaagagattagaaaaggtagctgaagacattcattataaatttgaatcagataatattatggaagaagatttaccaaaggtaaaaagtatacttaaaagtttgaatggaatgttgacaataaaaaatactcttacactatataaggatttctttaaacaaatgaatatatcaaacatgtttgtgatggcagaaaagaaaacacttgaatggtcagatgtatacccatttatatatattcatgctgcatatgaaggtatacaagaagataagattataaggcatattgttattgatgaaatgcaggactatacacctattcaatatgctgtaataaacttactttttaagtgtaaaaagactattcttggagattttggacaattggttaatcctaatcatactcatacattagatgatatgaaacagctatataatgatggggaactagttatgttgaacaagagttaccgttctacttttgagattattaatttcgccaaaaagattcaagatatatcttcattagagcctattgaacgacatggtgaagaaccggctttattaaaatgtaataacgagcaagatgaaataaataagataaaaatagaaattgaagaatttaaaaagagtgataatgcgactcttggtattatattaaagacagataatgacgctaaagctgtatatgatgcgttaagagaagaatatagtgttcacttaatatcttctgaaagttctagctttacaaaaggagtatccataacttctattaaaatgtcaaaaggtttagagtttgatgaagttattgtaccttcagtaaataataaaacatattatagtgattatgaccgcagtttgttatatattgcttgtacacgagctatgcacaaacttaagttaacatatgttggtacattaactcaacttataagcatgtagattatatcttatatgcatttattatcgtaaatataaattgggacaaagattcatcaataaatcaacaaaaaataatacttataaatttataaaaaatgaaagctataaattacatttgaaattttataaaattttgtgatttatagcttttataatattaatttcttttaaaataaagttaaactttaaatttatgaaataaaacaaagtagtaatatatatgtaatagttcttaattttttaatattagtattatattatctatatatttattgattttctaaggaaatctgatgttatagtgcaacctctttcaaacatttctagtggtgtaccttcaaatacgacctgaccaccgtttttgccaccatcaggaccaatatcaattacccagtctgcttgtttcaatacatccaaattatgttcaattataattacagtattacctttatcaactatatgctcaaaaatcaacataagcttttcaatatcagaaccatgaagccctgtagttggctcatctaaaatatatatagtaccttttttgttgaggtttttagctaacttaattcgttgacgttctcctccagatagtgtgctaagtggttgacctaaggtcatataaggtaaaccaacatctttcattgtttgtaagattttacatagcttcttttctgtaaaaaattcaagagattcatctactgtcatagatagtacatcaactatacatttacctttatataattttgacaaaacttcttcactatatctagtacctttgcaagcttcacatgtattaataatagggtccatgaatacaagctctgtaacaagtactcctttaccatcacaaacaggacaagctccctttgaattaaagctgaataaaccttcttcaacattattttctttagcaaatacttttcttatctcatcaaagaaaccaagaaatgtagcaggcatagaacgatttgtagctgtaactgggctttggtcgattttaataacatctttttcgtatttttgtgcaaaaacacgagagattaaagtactcttgccagaacctgctactccagtaacgacagtcataattccaactggtaaatctacatcaatatgttttagattatttatgcaagcatctctaattggaagggtaccttttggatgacgagagtcagtttttataggtaatgatagattcattgcatttgaagtaagagtgtttgctaaaagtaatttatcataagagccttggaatacaacatgtccaccctgagtaccagcacttgggccaatatctataacttcatctgctatggagataacatctttatcatgctctactacaaggacagtatttcctctatctctaagtttttttaatagctgattcatacgatgtacatctcgtggatgcataccagcactaggttcatcgaaaatataagtcatacctgtgagactgctccccatatagcgtacaagttttaatctttgagcttctcctccagatagagatgatgattctctatttagatgtaggtaagggagaccaatatcaatcattctttttaaaccatcagtaagagtctttattacagtttcagttcttttatcttttatttgtaacaataaatcataaaggtcagtaagttccatattgcacatatctgcaatcgaatatcctaaaatattacagttaagagtttctttatttaatctttttccatgacatacaggacattccttatctgttataagtctttctgatttttcttttgtgtgtttgctcatattgctaatatctcgatttagatatgtttgattgtatttgttaaaaataccctctatttttggattttcttgttttccatctttattttttgaaccataaagcaataaattatattcttcaaaagaataatcttttataggtttatctaaatcaaaaagtccagactctgcatactgcttccagtaccatgaattaggtttaaataaagagtcatttatacatcctgtattccatgaattttcaggatttataatagattcaatattgattactttaactctaccaatcccagaacaatttttacacataccatttgggtcattaaaagaaaaatatgaagttgttcctatgtagggttctccaattctagaaaataataatcttaatgatgaatacaaatcacttatagtgccaactgtagaacgtgcattgccaccaagaggagtttggtctacgattacagaagcagttaaattatcaatcagctccacctgaggttttctatatttaggtagcctatttctgataaatgaagaatatgtttcattcatctgcctttgtgattctgctgcaattgtatcaaatacgatactggattttccagaaccagaaactccagtaaaaacaacaattttatttttaggaattttaaatgatatattttttaggttattttgtgtaagtccttttattataatatttgacatgaatgttaaatcctttctgagtacattttagtaaagcaattatattatgtaaccatattataataaaattaaaatctactttcttgatatattctgctatgttatagaaggtatttctaaatttaaccaatcccatacaatctgaataaatgatagttgataatagataaaaaagtatataatagatactcgtaatttgataagtacaaagataattatacaattaaaacgacttgacatttaaaacttactattgtaatatttaaatattacaatagtaagttttaaatagagaataaataattacctcacaaactgaaaggaggacataatgatactaatagttatattgagtatattcatcatagcctcaatcaacataattatattaggtaaagaaaatataagagatatagttatccctttaactctatttattgtaagtgattttttatttttgtgtggaaatataatatgtaggggaggagtaatgctactatttataggtttatttgcaataccattgatgctaattgcatttatatggatttgtgtacatatgattaagctttactataaaaaagatttaaataaaagaaaaatgattggatgtatatttagtatctttataagtataggtactatatttattcctagtccaagtgaaagttttagatttaaactttatgaaaaagattatagtgtagtagctaaagctattttgaaagtttatgatgaaaaaaagttaagctctgaatctgtcttttatattcaatctgataaaaatgaattggagaagatattttctaaagaagtaataaaaaaaatgaaaaaactaaacagaaatttagatgtagttaaaatttctgggaatagaaatttagtctattttttctttggagctgaattacaatctattgatggtattgtgatttttaaagatttaaaacatgttaaaccaaagttagattttataaatagaagtattcaagctcctagattggagtatattacaaataatgtatattattttaaaggtgaactataaacttatgtagaggagatggtataaagtatgaaaagaaaaaataattttatttggatagttattcttctagttgttgtagctatgggagtatattatgtaggaagaaagcataacaacacaaaacaaaaacatgataagaatcatataaactctgaattaaataaatccaaagttgaaaacaatgataaaaacaaaaaagaaaaaattaatatggttgactatagtgactgttttgaaggtattagtggaggagctattttttataatactaaaaataaagaatataatatatataacaaagaattaattgaaacaagaaggtcaccatgttctacttttaaaatagtttcaactttaattggtttagaaaaaggggtaataaactcaaaagaatcagttatgggatatgatggtacagagtatccaaataaaaattggaataaaaatcttagtttagaagaggcatttaaggagtcttgtgtttggtactacaaaaaattgatagataaagttgatgctaaatctgtccaaaacattttagatgatttaaagtatgggaattgcgatattagcgaatgggaaggagatttaaaaaatggaaagggacatttaaatggattttggttagaatcttcattacaaatatctccaaaagaacaagtgcaaacaatggcaaaaatatttgagggagatacaaactttaaaaaagagcatattaatattttaagagatattatgaaaatagatgtaaatgataaaaacataaatgtatatggaaaaactggaacaggatttgatgaaaaaaataaacgtgtggatgcatggtttgttggtatgctagagcgtgaaggtgacacctattattttgctattaaatcagatgattccaataaagaaattacagggccaaaggtaaaggaaattgcaattaatataattaagaaatattatagtgtaagggaataaacttaattttatttgtaaatattatttacctatagtctgtaatatttattaaataattttactaaattgagtctatatagagcaaaactcctttagtacataaaatacttgctattgattattaaattgaatacctatagatttaaagttaataccttttaaagactatgtaatatattaaaagtataaataaaatatattgcatagtttttgttttatattataattttaaataatgtgcaaaaactaaacaatatttttaatagtaatttatatttgtattcatgtcactataatgtcattttaggttgctaaaatttaaccataaaggagatgattgtatatggaaatattaaaatgtgaaaatctcacaaaaatatatggttcaaatcaaaccagagtgacagcccttaataatgtaaatttatcagttcaaaaaggtgattttgtatccattgtaggagcatctggttctggcaaatctacattgttacatctgcttgggggagtagatagacctacatctggaaagatttatgttgaagatacagaaatatcaagtttaaaggaagaagctcttgcagtttttagacgtagaaaagtaggtcttatttatcaattttataatcttatacctacccttgatgttagaaaaaatatattattacccatgttacttgataaaagaaaggtggatgaggatagattctctgagattgtatctatattgggattatctgatagattaaaccatcttccaagtcaactttcaggtggacaacaacaaagggtatctatagctagaagtttaatctatagaccagctattttattagcagatgagccaactggtaatcttgatagaaaaaattcagaagaaattgtagacttgttaaacttatcaaataaacgatttaatcagacaatacttcttattactcatgatgagaaaatagcactagaggcaaatcgtattgtaactatggaagatggagtgattgtctctgaaaaggtggtgaagaaatgaatattcttcaagaatacaccttagactttgtacgacgcaataaacgtagtagtatagctataatgttagctatattacttactacaaccatgatgtcttctttgtgtggactgttgtataccatgtggacagattttataagactttcaattgagaaagaaggtaactggcatggtgaattgtttgactatacttatggaagtgacttaccattaattgaaaatttttcttcagttgatgatgtaatggtaaaaggacaatggtatgtaggcaaaattaatgatgagaaaagagattatataatttatagaaatgctacatcagagtattggaattctatgccagaaaaggatactataatagagggtcgtcgaccaaataatgctaatgaaattgcattatcaaaacaatattttgagaataatccaagtgtaaaaattggggataaaattactcttccaataggagatagaatcctaaatggaaagcctcttgaacccatagctcaaaaatcgaaaggggaaagttttaaaaaaatttcagagactacattgacaatagtaggaaaggtagatgtttccacttcatcagtaatacctgcatatacagctcttggatatcttgatagaacaagtataaaacctaatgatagtataactgtgtacttgcgatttaaaaatataagagacacatacaaggaacttccaaaacttgctaaatcattggggtggaagactaatgaatatggaaaatacaatcttaaatataatagtaattatcttttaaaaatgttagtcttttccccagaacagaaagcatctatgagcagtatatcaaaattttcaactcctattatgtatcttacaatagcaatttttacagtagctgtgtttgtaatggtgatttacaacgcgttttcactatctgcaaatgctagacttactcaattagggatattatctagtgttggtgcatcaccaaaacagattaaaatgtctgtagtgtttgaaggttttttgcttacaattataccattgccaataggtttatttttaggatggttattgtgtaataggcttatagtttatattaattcagttaattatcatactgatgttccagaagtggtatttacttatggtattcctgcttttctgccagcagttttacttacaatagtaacagtctggatttctgcacttataccagcacgaaaagtatcaaagatatctcctatagaagcaatacgacaaggagatagtgttaaaatcaaaaagtcgcataaatattcattaggaaagatatttggaatagaaggagaacttgcatcaaacgcactacgtgctcgtaaaaaatcttatcgtactgcaacaatatctttaacattatcttttttattacttacatgttttttgcatataattgcaaatcaagaaggagcaaaagctgtttatggaagtgataattataaggaccaaagagatatagcagtttatttggaaaatagtgaacctgtagagtctgctttcattgaaaaattagataatacagaaggtgtaaaaagttcactatattatcaaaaaatgtctgcttccacttggctgactgaaaaagatgcatcaaaagaacttgcgaaaaatggaggatttaaaagtatagtttcatctaaaaaatactctcctatagaacgtgatggcaagtttcgtataatttcaaatataattgggcttgatgataagagttttacagaatattgtaggcaaatttctgtagacccaaagttattttatgatacaaaaaatccaacctcaattgtatataataaggaggaagatattaatcgtagtacacgtagaaataaagtatatatagattatttaaatctttcaataggagataacattaaattaaatgaaaaagtatatgacgaagataaaggggattatacttacaacatgaaagtgggagctattacaagcacacttcctaaaacagtagatactagttcaaaatatacattaatgcaaatagtgccaatgtctatggtgcaggaaatatctaaaaattatgatgaagtaagtaggttacgttcaaataggctgataggagtatttaaagtaaataatcgtgaggacattcctagagtaagagaaaaattagagtccatttataataaagactatggttcaggagattatagtattgaggatgttttagaaagtgaaaaacaaaaggctagtggaataaagaccatgaatttaatagtaggctttattacaggtttattggctatgattggattatcaaatgtacttgctacagtgtcaggaaatactagaagtagacgacaagagtttgctatgttgcgttctgttggattatctccagaaggcataaaaaagatgcttgttttggaaggtttgttcttaggaattacaccattactacttagtattcctgtgcaaataggaatagtgtatgcttttctacgtataaatgaaatatattttatagagtatttaccatttgcacctatatctacaataataggttttactatattgatactttttattgtaatagcatcatatatgacaggatacaagcagttgaagaatgaaaatatagtagaatctataaaaaatgaaacaatataaacaaaagctatttgaacttatttaaaggtttcgatttaagactacttacaagtatagggatagttaatttgtttgtttaataaaaccttaaatgtaaatagaagtatattactaaaacaatagataacatagaatatagatatagctggattataggtattttacctataatccagcattttatgtgtaaaatttaattatgaatcttgcaccaccattatggcaattttctgcatgtagagtaccattttgacgttctataatagactttgatagagcaagccctataccaatactgtccttactagcatttttaccacgataaaatctattaaaaatatatggaagttcttcctgagcaaaccctttaccattatcttctatgataatctcaacatatagaggattttgactataataagcaactatatatccaccatcttctatatgctcactacaatttttaagaatatttaaaagagcttctaaagtccaattaatatcgatttcaaattctaccgaaggagaagcctcgatagtaaatgtctgatgtttttctcttaaagaaccttctataggctcaattgcataagtaagaagagaatgtacatctataagtttgctttcaaatattaaagtacttgcatccaattttgataatgtaagtaaagatgaaactagtctctcaagtcttgagatttgatttgtaagtctgttaatataatctatttcttcatctggacaattttctgaaagtaattgtgccataagtgacatagaagtaattggagtcttaagttgatgagcaatatctgcaagattatctgaaagagtttgtctttcttttaaagcaaattcttttgaacaacgaagttccccaactgttttatatatctcatcttcaaggtgagaaaattcatcttcacatcgtaaaagtacagactcttttcctaaattcacttcttctaagtattgagtaagattgtttattctactcagtttttgcttatttgttctatgtttgattatatatacaactgtagccattgttgaaattataccaaacgatatcactagaaaataaaaaaagtttttactccaaaatgtacttttagaatatccatgttttgataaaatttcatttcctgttttaaaatccttatcactagaatttttcagtgattttagtatactttctgtagacttaggattgtactcatatgatgcaccaagagccttagacagtacattgtattcattaaaagaagttatagttgttagaattacacttaataaaaaagttataattaagcagaatattataaaaacaactgtactgttgatatttcttggagttttcactagctgtcctccattctatatcctatgcctcttaatgtttttatacaaggtggattttttaatttttctctaagacgctttattgtaacagtaagagtgttatcatttacgaaattaccatctacatcccagagcatttctagtaactttgtacgggtcatagctctatttttattttccataagacttagaagaagtttatattctcctgctgtcaaaagtacttcaacattatctaaatatgctttgacttcaactttattcaagcttatatttccacatgtaatagtattgttagtatttgaatgagttcttctaagaactgcattaattctggattgaagtactgagagcagaaatggtttaaccacatagtcatctgcacccatatctaatccacgtataatgtctttttcatcatcacggactgtcaaaaatatcactggagtatcttctatacttttaacatattggcaaaactcgtatccaataccatcaggtagatttaaatcaagcagaattaaatcaatagttttatcaaaattttttttagcttcagcaatcgtattataacaacatacagtgtgatttttcttttcaagggaagtttttattccaaatgtaattgtatcatcatcttctaaaagaagtattttagccatttacttttagtcctttcagtaatttagttatttcattaactaagttattagttttatgtttaatattttttatgttagagatagaagttagagatagaaaaaattatcatttaagtatataaactttaatttataaacttaggtttatgctttaattgaatctattaaaagagcaagagttgtttcaataaatttttcctcatctatattaaagttgttcaggtatgactttcctgttacagatagtaaattaaaaaatcctgtaagtgtaaatattgatgaatacatgagagtaggtatttcaatatcatgcctaatacttctatcattttttccaatttcaaacattccttgtatttcatcaaacataaatttattaaaagaaaaaaacttttctttaaacagcatatcagtatccgatttttcagagtttacaataccaatcattcccataaggcataatagagaaggttctacagagtaaaatttatgaaaagcaaagtatgaaagttttattttttcaaaccctgttttgccttttgcactttctattttaacattatcccaaagtcttttatatcctcttaagacaacagcaaagaataaatcttctttacatgaaaagtacttgtatatggtgcgtttagtatattcaacttcttttgccaactcattcatagttgtattctgaacctcccatgactaaagtcacagggttcctgcttcatagaattttgcatactaaaatatgtcttactaattctccacaggccatccccgtagttcctacggttcttacataagttatttattttgaatcgttattagtcttaatccttcttttaatatatttatacttgcatttatatctctatcgtgagtttcattacaactaggacaaatccattctcttatatttaagttcttaacttcctcgtttttatacccacatttattgcatatttgtgaacttgcaaagaatttacctactttatacaatttgtctaccataccaattagccttgtattctaattgacgaataaattctgaccatgatacatcagaaattaagcgagatagtttatgatttttaatcatattctttacttgtaaatcttctatgcaaataatatcattctcttttattaatttagtagataatttttgtagaaaatcatttctttgattagctatatgttcttgaagtcttgcaacttttaatcttgctttatttctatttaaactaccgattgtctttctcgataattctctttgtaatttagcaagtttgtttaatgacttcttaagatacttaggattttctataaattctccacaacttgagatacaaaattctttgattcctaaatctaaacctgtctgattgttagtattttcaaatacttcaatatctacatcagtacagcataatgatacataatatctaccacttggttctttagatatagtagcattaagtattctaccttgaggtacttgtttatcccttatcttaaccataccaagtttaggtagttttatatgttgaccacaatacataatgttcccatttgtaaagttagttttatatgaaaatctattaattttctttgatttaaatttaggaaatcctgccttttctttaaagaatttttcatatgcgttttctaaatcttttaaggcgttttgtagtgaaaatttgtcaggttctttaagccactttaattctttttttaagttggtcaaatcagaactacactgtttataagtaaaagtttctttatcgtttttataaacttctattcttttagcaagatacttattatatacaaatctacaacatccaaaagttttgttaattaactcttgttgttttttatttggatacattctaaacttataagctttttccactactaccacctcactttacttgttttttctgattattaatatattttcttatctgctcctctgtattttctgatacagtagcaacgaaataactaggattccaaagatgtctccccataatacggatgtctgtatttgacatactatatgcatatcctctaccatgagtaacttccatttttcatcacctatcataatattaaaatatgcaattacttaaaacaagtattttgaaggttttttatatttatttttaaataacatatataagaaccgtaagtcttaacttttatcatttttgaggttgtcgttcacataagttcgctactacctatgcagttctcttatgaacttcttacactttcatgcaagcacagactatatcttatccttcggcattatccgttaaggtctacccacttccactaccaatagcttgtagtgtacttccctcaagaggaatagtcgttgaagtttctcctattcggagcttacctgctgattgcccattttaaagtacttaggatttaaccttataccatctaaccaattttttctactttcgtaactttcacacttaggtttatttcatccttatgttttagtttggttagctttaggggtttccagcaattcaagtagtattggataggtgttatcctatctctacatataggtttccctatatgctgactattttagctactaactcatgactaaagtcacgagtgtgcgtagctattttttaatcaaatccattaagacaaaataatttttctgccttatcaataatctcattttctctttgtattttttctttatctctttttgataattctgacatataaattattcctttctattgataaaaaagtatactgatggtatacttatgtaaatataatatttgtatacctatagtatactttaataaaaaataaaattaatatcaagtattataactatttataactttattaattaattatataggtaaaataccaaataaggggaatttatttatgaagataaaagaaaatgtattaatgttagatagtactcgtggttcaaattgttttattgtgttcgataaagaaattattcttatagacacaggtcttccttttatggggaaaaatataattaaagaattaaaaacacttggcattaaacttacagatattaagcatattttattaactcatcatgatgttgatcatatatctaatattaaattattgaaagagaaaacaggagcaaaggtatgggctcatgtagaggatataccttttattataggagagaaggatagacctgggtttaagaagtttattggaaaggcaatttccagaaggctcattaaggatgttgaaccttatggagagaatatgaagattgggaatataaaaattatccatactcctggtcatactccagggcatgtctgcatgatttttgaagatgtattatttgcaggtgatttagtcaaaaataagaatggaaatatagttccttatcctaatccatggaattgggattataaaaagatgatgaaatctataagagaattggataatttaaaatatgaatggatatgtatgtctcatggaactccttgtattaaataataaaaattaacatggattaatagaggcatagttgcttgtatgtatgataataatttacagcttctttttaatatatcatgtatatttgtagctgtaagcatatttataacaatacttataattttgtattttaacatctataataatagttttagctttgttaactatgaaatttacttaaagaagtaaatattcaagtaatagtaattattaaataagataaaaaataaatggcagatgaattaaagtaatttctaccatggaaaatacttttgagttagaaaaaactctattttagagtatgaagagatgaagcttccgaagaaagcaatatctaaagtacatgttcgaaaggataagtactttttggtgcctgcttttagcaggttatttttattttaataaaaataaaatcaaatgattattttatccttattatttaagactcttcactagaaaaagcaactaatgtatattaaaataatatttagggagtggaaaaaatgagattagaatcgttagttaaccaaagttataatagtttaaatgaaaatgataaaattattattaaacaaatattgatttgtcaaagagaataccgtaatttttcgtgtgaaaaaattgcaaatgaatgtaatgtttctagagctactttattaaggctttgtagaaaaattggattagattcattctctgatttaaagtatttacttaaaaataatcaactagaatttgttaataatgataataattttcatgatgtttgcgagaattatcgactattaatgaatgaattacaaaaaatatcatttcaagatatttgtaaaataatatatgatgcagaaacaatttatatttatgggacaggtaatgaacagaaaagtttagctcaagaaataaagagaatatttctttcagtaggtaaatgtgttattgacttatttgatataggtgaaattgaatttatgagagaatcatttcaaaaaagtgatttatttattatcatttctttgtctggagaaacaaaatcaggaattgaaattgcaaaatttatcaacaatcatatacatacgatttctttaactaggcttgataataatacaattgcaacactttgtgagtataatctgtatgttgaaactcaaaaacttgatacattacaagctatatcttatgaagtcgtaggagcattttatgctctattagatttgcttcatatgaattacatagagtatagaaggagaaaagaatgaaaattgaaggacttttcaataaatattataattcatttacagcaaatgataagtatatctgtgagtgtattcttaatcataaagaagattgtattaaactttctatagatgaatttgcagacaaataccatatatctacaagtgcactttctcgttttgctcaaaaactacaattacctggatatagtgaattaagagttattatacgcttaaatgaaacagaagtagaatataaaaatcaaagtaaacaccaattaatggattgttataataaggtgatagatgatatagagaagaaggattgttcgattatgtttgaaagaatgaaaaaggcaaatcgtataatcgtctttggagaaggttattctcaggaaagagttgttaaagagatgaaaaggattttcttaccaacagggaaaattatatatgatgtttatggttatgatatgattcaggcgcttaatcattttataaaaacagatgatatgattttctttatctcattgaatggagatacatctacaattattgattttgctaaagaaatgagaatgaaaggaacttatatggtttctattacaaaaatgataagtaatcctttagcaagattatgtgatgaaaacctgtatattcaatctatatctatttctgtagataaacaactggactacgatgtaacaacaccttattttattttaattgaactgctttatattaaatacaagatgtatttagaaagtgaacatattccccgaaagtgaaaatttgtgctaaaaatgaacatattttttaaaagatatcaaaatattgatatctttttttttgaatgctattatgattttgatagtaagaaaggaagatgaaattgtacaaattattaatacttgatatagatggtacgcttagggatgaggtatatggaatcccagaatctgcaaagcacgctatacgtttatgtcaaaagaatcattgcagtgttgttatttgtactggaagaagtataggtacaatacaagatgatgttttatcattaggggttgatggatatattgcaggaggaggtaattacattcaatatcatggtgaattactttataatcaatcttttaatcaaagattgataaaggaagttgtttgtttgttaaaaaagagagaagttgctttttcgattgagagtcaggaaaaagttttcatgaatcaaaaagccaaagaaatatttgaaacaatgaatcagttgaaaggaactaattcttgtataaataaacaacatatccaagaaaaaataacatatgaaaataatattgaagagtataagtcacaagatgtacataaaatttgtttatggtcaaatgaaaaggtatttgacgaagtgaaagatatactacaagataaaatggaattagcacagagagatatttctagtcagtattatgaaattattcaaaaagattttcataagggcaaagcaattaagagattacaagaaagattaggggtaactcaaaaagaaaccatatgttttggtgatggtcaaaatgatattgtcatgtttcaagcatcagacgttacaattgcaatgaaaaatagtcatcaacaacttaaagatatagcgacatctatatgtgaggacatattcgataatggaatttataaagaattaaaaagaagaaatatcatataaaaaggagtaatttatggaaaagaaatggtggcaaaaagaaatcgtttatcaaatttatccaagaagctttcaagatagtaataatgatggaattggagatttacagggaattatttctcgtttagattatttaaaagatttaggtattacatcattgtggttatgtccaatttttaaatcacctatggacgataatgggtatgatattagtgattatttagatattgcaagtgaatttggaagtatggaagatttaaaagagttaattaaagaaagtaaagatagaggaatcaaaattatattagatttagttcttaatcatacaagtgatgaacatccttggtttcaagaagcattaaaaaatccagaaagtccttatcatgattattatatttttaaaaaaggaaacgatttaccaaataactggaggtctgtttttggtggaagtgtttgggaaaaggtagagaatagagacgaatattattttcattcttttggtaaaaaacaacctgaccttaattgggaaaatccaatattaagaagtgaactttaccaaatgattaatacctggtctcaaatgggagtggcaggatttagagttgatgctattacatttatcaaaaagaatttaagttttcaaagtttagaaagtgatggtgttgatggtcttgttaaatgtacaaaaacagttagaaatcagcctggaatagaaaaaatgctttatgaattaaaagaaaatacgtttaaaaaatatgattgtatgactgttgctgaagcagcaggtattagctatgaccaactaggtgattttattggagaagatggtttcttttcaatggtctttgactttaaacatgctgacttagatgttgcttctggtagtgagtggtttaaaagaatttcatggacaattccagatttaagaaaatgcattttagatagccaaatgtatgttcaggaacatggatgggcagctaattttattgaaaatcatgaccaaccaagagctacaacaaagtatcttttgcaatacgaaaggaatgatgatgcagtaaaaatgttgggagcaatgtatttctttttaagaggaacaccatttatttatcagggacaggaattaggaatgacaaattttaaaagagataccataaatgattttaatgatttatctagcattgaccaatactatcgttcaatagatgaaggttactcagaagaagaagcgttagaatttgtgaatttaagaagccgagataatgcaagaacgccatttccatgggcagataaagaaaatgcaggtttttcagatgcaacaccatggttaaaggttattgaaaattataaagatattaatgcacagagtcagattaacaattcagaaagtattttagaattttataaaaagatgataaagttgagacaagatagtaagtattctgattgtttgatttatggttcaatagaacctattgatatagaaagtgacaatgttattgcgtatagaaggcaattagatttggtagttattgattgttattataatttttctgataaacttgtagaaataaaaacagaagaaaaatatgatattgtattccaaaatttagatgatataaatctactaaataaaacagtgagtttgaaaccatttcaagcagtattattgaaagtgaggtagaaaaatgaataaatataataaaatagcaaatgagcttattgaaattattggtgaaaataatattatttctattacacattgtgccacaagattaagggtgatggttaaagatagagaaattattaatgataagaaagtggaaaaggttaatgaggttaaaggtgttttctttacttctggacagtatcaaattattctaggaacgggaatagtcaataaagtttatgcagaagttgaaaaaatgggattgaaaactttatcaaaaaaagaacaagatgaattagttaaaaataatgaaactggatttaagaaagttatgagaactctagcagatatatttgttcctattattccagttattgcggcaacaggattattcttgggattaaagggttgtttgtttaatgataatgtacttggattatttggaatgtcttctgcaaatattccattgtatattcagacacttgtttcggttcttacagaaacagcatttgcttttttaccagcaattattgtatggtcagcatttaaggtatttggaggaacacctgttattggacttgttattggacttatgttagtttctccaatacttcctaatgcatattctgttgctgacccatcaaatgaagttgaagcaattatggcatttggatttattcctattgtaggctgtcaaggaagtgttttaacagctattgttacagcatttattggagctaatcttgaaaaatggttccgtaaacatatgcctaatgtattagaccttattttcacaccattctttgttatgctaataacaatgttagttattttgttaggtgtagggcctataatgcatacaatagaattaaaaatggttgatatcatcagtttattgattggtttacctttaggaattggaggatttattattggatttacatatccattagctgttattactggcttacatcatacttatgtaatgattgaaacatcactattagcaaatacaggatttaatgcacttattactctttgtgcaatgtatggatttgcgaatattggaacatgtctagcatttatgaaaaaatctaaaaataatcaagttaaacaaactgcagttggagcaatgctatctcaactttttggtataagtgagcctgttttatttgggattcagcttcgatataatttaaagcctttgattattatgtgtgcatcttcaggtttaggagcagcaatattatcaattttacatattcaatctaattcatatggattagcagttttaccttcttatttaatgtatatctatgatggatataatttaatcacatacttattagtatcaatatttgtggttgcattctgctttattgtaacatgtttatttggagtgcctaaagaagctataaatgaagatgaagacgaagaattagtgtttaatgaaaataatgaaaactttgtgtctccagctaaggggaaaattgttgcattagaaaatgtaccagatgaaacattttctaaaaaaatgttaggtgatggttttgctattgatattatagatggaaaaattgtttctcctatttcaggtaaattagaaacagtattttcaagtggacatgcatttgggattaaaggaactaatggagaagtattaattcatgttggaattgatacagttgcattaaatggagatggctttgatattgctgttaaacaaggagatatggttaaacagggagatgttcttgttaatgttgatttaaagagaatacatgaattaggaaagtctactttgacaatggtattgtttccagatggtaagaaggtaaatattttggatataaacaaggatgtaaaaataggtcaaagaatatgtgttgagtagtaggtgatatgtaatgactacaaaagaagattatcaagagtaattcaatctttttaaagtatgagaaataattcataaactctaaaacaattaaagaggttgtctcaaaatagagattgtactgcacccaaattgttgaaatgatgaaaatatatttaacttcatacaaaaaattaaatagtggcaacaattgaggatgtgagggagagttgccactatttgtatagggtattatattatgtttttaagctagttttactatcttctatgtttatataataagccttgtatatgaatttaatcgataattaatatgaaaattatgtgaattttttagaatgtacagtaaatatattaaggattatagatttttttgtcatttaatatggataatgttatcttagatgctgaactaccattagaataatctttgctttgaatatttgtagcaaagaaataagtattttcatttttttccacataacctataaaccaaccatttacatcttttccatttatattagcagtgcctgttttaccaaaaagtgataccccatccttttttgatattaacaatgaatcttttactgtttctatatttttatcttcaaatttaaacttatttgtataaaaactttcaagtaattctacctgttcaataggtgatatttttaatgaagattctagccaaaagtttgagataccacctgaaacatcataattgccatatccaatttgcttaagataagtttgtatgttttttagccctgtttttttgtctagagtctgaaagtaccagtttacggagttttccatagcagaaaataagtcttggtcttcattccaagaactattagaatgatgctttccatcccaagggatatgtgaattatttcttgttattatcccattttccaatcccaataaggcactataaatcttataagtagaatttggagaaattcttgttttacttttttctttattgtaaatatgatattgcttggattttaaatcatacataacaaaacttccatcaaaacctttaaaatactgacttaagtcctcgtacacagtttgttcatttgtaggtctatatttttcgttgatatctgccataatagatagtttgggaatatttccaaatacaattaaagctatcaatgtaaaaattaaaatgcttttgaattttaacgtatttgattcattatgaaaatccattatcttcaatagtcgcttttttatttgtttttttgacccaccaatatctgatgtaagtgtaagatttgatggtcttgaaatattatccacaaagtttattagagtttgtccatattctatatgactatctttatcaagcttttttaaaactgaaatatcacatgcaatttcacggtctatacgcatttctttaaatgcataccatacaagaggattaaaccaatataatatttgaaggaagcacattatataatttatcagtatatctttatttttaaagtgttgtaattcatgaagtaagatatattttatatcttttaaagataatttagatatagacttatctggtaatataatgtgtggtttaaagtatccaaatgtaataggtgtatttataataggtgatttgcatagtataaaatccttatttataccaatatcttttttacacttttcaaatataaatactatctcctcatctcttaaaatttgtattgattttttcatattttttattttaatattgcaatgaatagtaatagctatcatgattaaaattccaattatccatgatattagtaataaaatatttaaactatcaaaattaacttggtttagggatactgaaaaatcgtttaatgcatttgagttattaattatagaatttggactattttttataatagaagtcctattagtactgcttccaagttgattaaaagtatataaatagttaaatacatttccaagattaatatatttaagagggacaaatggaattattaacattataagcaatataaatccaatattgtattggtactttgcagaaatatgttttttaaatacttttttggcaagtaaaattataacaattaatattgataaggttaatgtactgagtaaaaatcgtataaagaatggggcatacatatttatttatcccccttagtcgtccttttatttaagatttctctcagttcctcaatatcatcttcagatagtttatcattttctaaaaagtttagtaccatagaattaagagtaccattataaaaacgatttaaaaaagaactactttctgtagctacgtattcttcttctttaacaagtggagtataaacgaatactctgctatttttttcatatgttaaagctccttttttaactaatctcaataacattgtttgaattgttttaggactccatgtacttgtttctaccaacttttcaattacttcagtagtgctgataggagcatatttccaaataattttcataacttgatattctgcttctgaaatatgtggtaactttttcatactatacctccttctacttacatttgtaatacataaagtatattatcattaatttagtttgtcaattattaaaaataattcatttatagttgattaaataagcacatgtagttaaataaaacttttatttaagctgtgtaagtatagctttaaataaatggtttatattgacagctaaaaatatagttgatatacttattgttgatataacaactaaaaaggagatatagaaatgataattacagttataaatggaagccctagaaaaaatggagctacatcaaaagttttaacttacttgtataaagatatagaaagattaataccagatgtaaaaattaattattttgatttaagtgaggtaaatccatcatattgtattggttgtttaaattgttataaaatgggcaagtgtatcaatcaaaatgataaagtagagtatattcatgatataattactaagagtgatggtgttatatttggtagcccaacttatggaagtagtgtaactggacttttcaaggtgtttacagatagagcacatatgatgcttgaaagattattgtatcgtaagccatgtatagcagttactacatatgaaaatgcacgtggttcaaaagcaatttcttttataaaatccatggtcttagattcgggaggttatgtttgtggtagtttatctataaaaactggatttaatcaaaatcctataactgaaaaagtagaatcaaagatacaaaaggtatctaaaaaatttatttattgcatagaggaaaagaaaaatccacctgtgctttctcaaatctataattttattgctataaatgctgttttaaagccaatggcttttaaagatattgagcaatataagggaataattgatagatgggaggagcaggggattatttaaatggaggtaaaatgaaagattttgagaaactatatgaagctacaactaagttagtaagtacttcgttaaaagtaaaagatgatttaaaaaagatgtttaaacaaaatggatatgatataacaactgaccattatgcgttattaaggtttctatgggagcaagatggaatttctcagatagatttatgtgaaaaatcatgtaaggataaatctaatacaacaagaattttagacgttatgaaaaataagggattaattgtccgtaaagtagatgttaaagatagacgtaagtttcaaatattcctaacagatttaggtagagaattagaagaaccattaaatgaaattgcaagtatatatgcaacagagacatttaaatctatctctgatgaagaattgcctttgtttactgatattttggatagaattggaaagtaaatataaatcctattttaagagactttttaactattgatgatgtagaaatatagaaagagggataagaatgaatagtaagatttattatttttctggaacaggaaattcgctagtagtttcaaagattttaaaagaaacgttaaatggaagtaaagaagttatacctttagctatacatagaaaagaaaataatatagacataaatgaagatatattggtaattgtttttcctgtttattttgctgatgttcctgatataataaagtcttttgtagagaaattaaattttaatattaatactcatatatatgccattgccacttgtaatggggtagctggacatagtttatttactatagataagttacttaaaaaaagggggaaaaaattatctgctggttttttaatcaatatgcctggaaatgctttgataacaccttcagatgttgaagaagaaagattgaaaaatcagactaatagggtagctgagattgcaaaatgtatcaataacttggagattggaaatatagaaggaaaaaacaatttaaagtcacatatagatagtgttgtacttcgtttagtaggtaagaatatgcaaattgcaactactaaattttttgcagaaaataaatgtaatggatgtgggacatgtaaaagggtttgtcctgtagagaatataagtatagttgataaaaagccaaagtggggtaatgagtgtgaaagatgcctagcttgttttcactggtgtccaaaagaggctattaatgtaaaaaaatcttttttaacgaataggaagaagtatcaccatccagatattactgtaaaagatatatttttagataaatagatatatttgacttgtattaataattgttttattaaataaaaacgttagagatataaaagaaatataaagtaatcttgtaaagagtaatgttacctagactaaatggaatagagattaaaaagaacaatataaataataaattatgttaatagtatatagttacactaatataaaataaaagtgcctcataaatagaagtttttgaggcacttattatttggctaaattagtttttattattttgtaatatcaaccgtttataatctcgaacattttttttatatcttctgatgccatttcaaattttgatttttcaatcagtatgtttccaccagtcataatatatgatggaaatactcttaaattatcataataaagttcattattacgaagtttatatgttgaaatggaagggatgacattcttttttatatgctttttagtaatcatattaaaagatttttttgcaacatctcccattaacattactacctctaggtttttaaataatttaatttcttcttctaaaataggcatatgtaatttaattgtatcacgagttattgtatattctgatttaggaagttttactgcattagttatatagatacccatatctaggatatcatttatgttagatacttctattcctgcactgtcaaataaaggaatagtagtttttaaataatcagcatctttatctacactataaaaatcgtcattggtgttagttgggacaacctcattaatcattatagtttttattttgtctgtttctattgttatattaggaaggtaggatattattctgttgtcatcaaaaagattgttctgtttaataaattcacttaactttgattttatatttattttcatataacgagtctccttagttttaagctttaaattactataaaaagctagttttaaagcacacaattttgaaaatatagtagcatatttgaaagtataataacatataaaacatgacaacagaatgtcatgttttataaataatctatcgcaacttagaatttattagagactctgcctgttcataatcgtctttatgaacataaattaagtactcataagagaaatcttccttttgacctaaattgccaagtgttatttcattagaaaaaggttttttagagtaagcattatttttcactttatacttatatttaattttatttactgataatatattgcatatctcgttaaatctatttaaagaatatcctcggaaaagctcagttctatttaaaatcataaggaaaacctccttttaaaagtaatatattgaaaagcataggagaaatgtactataagttgttataaataaaaggtagcaaatttaaattgatttgtaaagtttttaagagtattatattagtgataaaataaataatttttataatctaactaataacaatttaaaataggtaacttatgtaagaatcgtagggactacggagatatcctgtagagaattaataagacatatttaagtatgcaaaattctattaagtaggaaccttgtaactttagtcatgtgagatttataaggatatttaagtattgaaaggagagtttaattgaaaaaaatatctcaagaaaaaataagtacacatatccaagaagtaccacaggaaaaaattgaacagtggaaatctttatatgaaaaatataaaagtattttaaaagtaaattctaagtctgttttagaaataatagagtttttaaagcgaaaatatgtaatagtagaagaaacttcagaggaatttaaacatgtagttatcaataatattaagttaaacaagcctttttcacaaaagatttccagtgataaagaattaaaacctattgtatttacaattccaaatgaaggaaatgcaaaaaaattgtacgatactcaagaggaaacttatagtggctgtaagattattgtaggtatggaatttgaaacaggttgtgtttttgtagaaggtagtgatgagcttaatgatgaaataacttcttttaaaggattagataaatatgatataagtaattattatttagtagcaaactatattagatgtctaaagaaatataaattaatagattagtgtttgattaataaattagtgcttgatttaaggattatagagtaaatttgaagttagtgtgataatgaaactaagcttaaatctaatataactgtaaaacataaacttaaatagagttgccaaaataaaattggtaactctattttttattttaatttttattaaaattagtaggtgttatagaattgttattttttcatgttagtattctcttagtaatagatttaaggtattacaagaagggagaaattaatatgaaagatttaattcttgaaacaaaaaacttatcaaaaagatatggagaacaaatggcagttaacaatgtttctctacaaattgaacgaaatagtatatatggacttttaggaccaaatggagcaggaaagtccacaacacttaaaatgcttgttggtcttcttcgcccaacagatggtcgtattatttttgatagaaagccttggaaacgagaatctcttgcaaaaataggttctttaatagaatcccctgcattgtatggaaaccttacagcagaggaaaatttgttagtacatacaaaaatattgggaatacctaaagataaaatttatgaagtgttggaaatagtaaatttgaaaaatacaggtaaaaagagagcttcacaattttctatgggtatgaaacaaaggttaggaatagctattgcacttttgagtgacccagagttgttaatactagatgaaccaaccaatggtcttgacccctttggcattcaagaattgcgtgaattgattgcttcttttccaaaaaaaggtataactgtaattctttctagccatattctatcagaggttgctcaagttgtagataatataggaattataaatggaggacgactactatttcaaggaatgcctgaccctaatgaaaatctagaagaattttttacagatgttattcttaaaggaggacaaaacagatgaatgctttacaatcagaacttttaaagtataaaagaacatttatgggtaaacttattgtttttttcccagtgtcttttgcagcatatgcatttataatgcaatcaacactcatgcaaaatccattatctcaaacaacttcttgggcgtggcaaagtcttttagcattaatttttaactggtggtcatttttatttctgcctattggatttgcattgtttgctactttggtagctttccaggaaaaaaaagctggaaattatcgtgctttacgtacacacaatgtgtctcctatgacactttggattaataaagttatagctatggcagtctacagttttatttcaacgttagttttaatagtcgtaacaattataactggtttaatattgaaagctggtccagttccttttggacagattataggggcaagtattgtatgctgggttgtttctcttgctatacttccacttcagctatggctagctacatggaaaggtatgttcctaagtatgggagttggagctttaggtatgatatttggtgtccttgctgcgacaaaaccattttggattgcagtaccttggagttgggcagttagaatggtatgcccaatcatcaacatacatcctaacggtactatattagaagctggagacccacttttgaatacttcagtgattcctattgggattgttgtttctttggttgtgtttatagtattaacagcgcttactgcagcttggttcaataggagggatgacaaatgataaagctattatcatcagaatggcttcgagcaaagaggacagctgtccagtggcttactctttgtatgcctattattttttcattatgtgtggttttttatctcacaactaaatctggaagtacacaagaatttgcttttgaaggattttttacagtatggactgtattcatcattcctattggagtaggtattttagcaggatttatagtgcaggaggaagagcttgctggaaattttaatggttttttatgtgtaggtatttctcgtgttagattatatctgggaaaatttctttttcttctgttttgcctaactatatgcacatttattgctacgttgatactttgcataggaatgagtattgcagtgccatctggagcaacaatatggttattcctgtcagcagcaggacttgtggtgattgggacacttccactattagctattcatctttgggtgagttttgcatggggtatgggtgcatctattggtattagtatcggtggaattttgatggcagcaatacttggattaactagcgttggtgaaaaagtatgggcatttgttccatggacatggccagtaaaactaggtatgcttccaggaatttattttattaaagaagctggaactatttcaactgaggcattttactctaaagtgatgcaaacagctagtatagagcttatagtagtagcaataggtttgattatattcttgataggaggcgttatttggtttaaaatgtgggagggaaggaaaagttattagtagacgaatattgttttaatactgaccttcccataagagaaaggtggtgttatattgagtaaaatattgattattgatgatgaaatggacctagtaatgctacttgaggatgaattgaaggcaaaaggacatgaagtgttgatagcttatgatggtcaggcaggtatagagttatcaaaacaggagcctgaccttattatactggatattatgatgcctaaaatgaatggatttgaggtatgtcaggcaattagagatgatgttttatgcccaattatatttttaagtgcaaagcaatcagaaaccgacaaaatcaaagggttgacctttggaggggatgattatgtaacaaagccatttggactgcgtgaacttatggcaaggattgaagctaatctgcgtagggaaaagcgttcacagtatatcaatgaagagaacaagagatctactttgtattttgggaagttatgcttatatatgaaggaacgtgcaattaaaattgatggtaagaatattgatttaacaaaaatagagtatgatattgttgaattactagcactccatgcaggacaagttttctcaagagaacaaatctatgaaaaagtatgggggtgtgattctgaaggtgattcctcaactgttgttgaacgagtaaaaaaaatacgagctaagttttctgctgtgacaccagaaaaagaatatatttccacagtttggggtattgggtataagtggaataaaatgtaaagagagagaggttattaaatgaaaaatcaatcccttattacccaatttagacatacttttatttttattataatagccagtatagttgccacagtgattacttatgtatttgctctctatttgtatattcattccttaaataaggatatctatccaccaaactattatgagcgacaagttcctagaattgaaaaatacatcaatgaaaaaaacataactttgttatcacaatcgaatgaagaaggtttaaaaagaacgattcgtggggatgatatgccatatcaagttgtggataataatggcaatattctatatggtactaaccccaaaaaactatttaaaacaaaagaagaattatttaataattttatcaataaaactgttcgtaaaggtggttatatccatactgttccaatcaaaggggataatggaaagattgagggagctgttattctattctatcaagtcaaaataacctttgcaaatagtagagggagatttgtatttgcagttattataatggctctgttttctccatttatatatatcgtgggttttactagatggctttctaagcgctttgtaaagaatatcaatcaaccattacatctattgattgatgcgtccaagaagataaaagaaaaggaccttgattttgaaatcgactattattcagataatgaactcggtaaactttgtagtgccttttctgaaatgaaagacgaattaaaaggttctttatctgcgcagtggaagatggagcaggaacgtgttgaaatggtggaagctctagcacatgatttaaaatctcctctttctattattttgggatatacagatgcacttattggtaataatacagatgacaatgaaaaacttcataggtatcttacagtgataagagaaaatacagaaaaaagtgctgctcttgtccaaaagatgcaatatacgtctgacttagaaaagtcaaatatacaattaaatcttgttcctataaatttacctgaatttttgaggcaaaaggtgcaagactatgaattacaggctcatcaaaaggaagttgaacttatattgaaaatgaaggggaatatacaatccccaattcaaatcgacgtggataggttgacacgaatttttgataatatcatatccaacagtctgcaatacactccatcaggtggtaatattagtattactgtaaaggatgaaaaaaattgtatttcttatgagatttgtgattctggtagagggtttagctctaaagatttaaaaaaggctcttgataagttttatcgaggagatgaagctaggcagacaaaaggtggacattctggtcttgggctttacattgtcaaacaattagtggaacagcttggaggttctgttaaaatagaaaattcaaaatcaggtggagcatgtgtgaaattttggcatagcatttaactatatattttaaattaaaggggagtgtctcaaagcgaaatttttaattcgtgaggcactctttttttgtgaagttaaatatattttcattattccgacaatgaaaaaaggcttatctctattttgagacaggccttttttaaagcttatattatagttaaaaagatttattagttagatttgaaagaaaatagagacagtcattgataatttaatttatattattatctgtaaaatagttataaattgatatctatacagtcaattatattcatctttttaacttttcttaacggaataagagtagctataatacatgcaagtacagaaataatagtagcttgtaaaattgaagtaattggtatattagtgaaatcaagcttttctatagttgccatgtttataataatagcactggcatacccagcaattgaaccaaatatagcagcaaaaattccataataaacaccttcccataaaaacattttatataagctaatattactcataccaatagctcttttaactccaatctcattagtcctagtatttatatttgtatgagttgtgttaatgatgtttaaagtaccaatcaatcccacaaataatataactgcccatgctagaaattctatttgtttaaaactctctttaagttgcttatctgattcaatatatgatatccaatgagagccaggattattttcacaaatctgttcaatagacaatcttatttgttctaattttgatttatctttagcataaatatttatctggttgaacttgtttttatttgtcaaggtgttataaacagaattatatacaataacatcaacaccatttatccagccattaccttgtaaaaagaacattttatctactgtactatatatatctagttgttttttgttgattgtgatactatctttaggttttaaatttgtatgtctagtttttacacctggtgtagaaatagcaatcggattttttataaaacagatagaaccatttttaaagtcttctagtatagaatctgtaatagaaggcattaagtcttttaaagtctgctcgtcaattccaatgatttttaacatctcaccactattttcaaaatttatatctgtatctatttcaccctgtttgtattcagagtactttataaaggaagtgcgattgacgtttttcattttatctattttatctagtgttgatttatcaaaaccagatatttcatttgttaaggaaaaatctccttcttttaaattgcttactgacctagatacatctaatacattagagaactcactcaatgcaacgaatactgttatactcataaataatgatagtatagttattatagttcttcctttatttctttttaagtttagccatgctagatgtctttcaaagttttttattgctttttctcttttaatttttcttttgattttggtagtactaccagccatagcaattttgggagagacacgtgaagcatatattgctgatggtaatgctgaaataaatgaaaaaatcaaagatacattagtgcttaatactaatgggaacatatatgctgttgtatttttatgtataagctcagtaatttctttattatcatttgctagaagtatatctggatttaagatattagtgaccattccagttatgcctttagaagagataattccaattacagctccaataggtatggcaacagtacataaaattaagatttgtaaaataactatcttatatatctggtttggttcagctcctattgctcttaaacatccatactctttaattttctttgtaacagagatttttaaaatattatagattacaagtccagaagccagtaaaaccaataaggcaacaaataaagataccaatataatcatagatataccatcactattagaactattttcatctttttcaaactgtatcttaagagcatttaagtaaatccaattatattgaattgaattgtgagaaagatttatttttttagctaattgatttactatttcttgaaacttttcttgctgttttattttaaaatccaaagaggataaaatatatctcttaggtaatagattttctgatgtacctttacctacaataccatttactataccacttacatatcctgtataatcatcctctaaaatgccactcaatttaaagttagctgtgtaattatatggtggtatggtatcatttaaaagtgaaatatctaaattcataggtatagtcactcctagtcttggttttatacccataagctttagagtgttttcatctaaggctatttcgtttttatctttaggcaaatgtccagattttaatttcattaattttgggtagttagaaagtcctgttttatcatactcttttacaagtacagagataccagaatcctttattttactactgccaatagttattgaagtaccagcttgataaactctatcatctttctttatgtcatcaacttgatttttagtaagttggtgaaaggatacatgtctatcaccattaaaagaacgggcttgttcaattcttaaattttgtaggataccaattgactgtccaaccacagttgtcataatagttgatagtactattgctataatgatgaatgtagtcataagtttctggctttttaattcttttattgaaagtgaaaggtaattcttcatttctatttcacctccataagaacaccatcaataattgaaatttttctatcagcaagttttgcaattctatcatcatgagtaattaccactaaagtctttccaaactgttttgaagtttttataagaagattcataacttcactgccacttttactgtccaagtttcctgtaggctcatcagcaaatattatatctggttttgcaataagtgctctagcgattgcaactctttgttgctgaccgcctgaaagttcatggggaagatgattgagtctatctgcaattccaagtaatgatgaaatttcatttaaatagtctttatcaggttgttttttatctagaagtacaggcattgaaatattttcagatgctgtaagaacaggtaaaagattaaattgttgaaagacgaatccaaaggattttcttctaagtgcagatagttctttttcagtgtgtttatatatatctttatcatcaagtaacacttgtccagaggtaggattatctaatccacttaaaatatgtaaaagtgtgctttttccacttccagaaggtccaattacagaaacaaattcacctgagtttatttttaaatttacattattaagtgctataactttattgttattagaaccatatatttttgataattgttttgcttttataatcataaaaaacactctccttttctatataagaagagtgtaagttttaaaactcaattttttcccaacttttagcttaaatctaaaaagtcttcactatttacggataattcgcagtgctgataagcagtttcagtatcatttttaatttaaaatgtaatttatgcactaaaggctttacaatacaactctattgctttaaaactattttacacataaacttgtggataattttttatgttttacttcctcattattatataaattatttttgtcacaaattctaagttgtcacataaatatactttttatatcacgatttaattcttttgattttatcataattgctatttcttcaaaagaagaaagaaaagccacgatacatatcataattcctgcaacatcaagaccaaagcaaatatagagtaatggaaaagcaaagatagaaattccagtgattttattcatcaaagtatgaagcgatgaaaatgtgcgatacttaaaaaaaccaatactgtaactaatcaaccgtaataatgctattgcaacaatacaccaccatagatacatgggaagagcaatattttttccgacagtaaccaaaattgtaaccgcaaaaatgaaatcagcaatactatctaactttgcacctattccactttgttgtctcaactttcgggcaataagaccatcaagtatatcactaattccacaccaaaaataacatatccagaaaggcagtgaacagaatgtagaactaagcattagcaatgcaaacacaatacgagagaatgtaatattattagcaaaacttttaatataatcacctccaaaattctagtttcatactattctacatatttaaatatatatttctattattgtttcaaatgccttttgccaaaatattataattgaagcaactcttacaacttctacaaaatagtatatatattggttgtaaattgaaatacattttataaattctaaactaacaaagcttatataagaacaatgaaagcttacaaaatcattttaatttcttgttgagaatttagcagtaattttagcactgttagtagaattattttcaatagaaatagagccaccatgtttttcacataatatttttgagatatgaagacccataccaaagtgtggattgctgtcatttaaagtcttatctctatagaaaggtcttaaagctaattttagagattccttactaaatcctataccatcatcttcaattacaaaggtaaggagttcttgttcaagatatataagtatggatacattatttctagcatatctaaaagcattcgatattatattttcgacgactctaagaatgatattttcatcaaaaaatagatttatattatttatttgacttttaagtgtaaaagattttccttcttgtttagcaatgatagatatattttcatctaagttttctataaacttgtttatattcgacatagattttgaaacaactaaatcttctaatcgttgagcattactcatattttctacatagtattcaattctgttaatatgctcagacataagttgtgtggttgataaaatcttctcatcactaagtttgcctgttggtatgtattttgttaaatagtttgagtaaccttttagaactgttaggggatttcttaaatcatgagaaaaagcagcattaagttgttttctatcattaatcatagtccacatatttatgttgtttttatttagttcagacctcattttttcaaaagcattacatagattacctaattcatcattattattatattctaagcaaaaatctaaattgttgttggatatttccattgcacctttattgaggatttctatgggtgtttttaattttaccttgtaaaaaattatatcagctaataataaaagtcctataaaaaatataagtggaagtacaagctgaagtatgttgattatattaagtaatgttttatcataatcactaaattggttcacattgttttgaactatggttataatacctgtatttataggtgtttttaaatacttatcttgtatagaattatatagattattaagtaaaatgtatgcgaaagtagtaagtactgatgctataattagtgaagataaagtaagaacaaagaaagctttttttaatgacatattacttattttatccatttataaccaactccccagactgtttctatataattttcaagagtatgttttgatagtttgattcgtatttttctaatgtgttccattataacatcactatttccattgctattgtatccccagactctatcatatattttttctttatcaaatacctgtccaggattcatagagagaagctctactatatcaaattccttttttgaaagtgaaatctgattattatatatacaaattaaccttttttcgtaatctattgttaaatcattataaaatttaattttagtttgatttgacttcctttgttcacgtcttaaatgtgcagatactctagctccaagttcgtctaaatcaaaaggttttacaatataatcatcagcaccagcacgaaaaccatttatcttgtcagtattttcaattctggctgtaagaaatagaatagggcatgatacataatctctaattctattacaaacttcaattccatctatttcaggcatgtttatatcaagtagaatgatatctggatttttggatattttttttaatgagtcttttccactttgagcagtgtaaacctcataaccattcatttcaaagtaatcttttaagagtgttattataccttcctcatcatctacgacgagtattttattgttcataagaatgctcccttctaaattaagtttgtatagtatttatattttagtataaaaatctcaataaattctcaaattcttagttatatttcaaaacttaatcattaaagttagtatatttttatatattaaataaatcaaggatgaaattattagaaattttaatagaatatatatttgatatttaatatttattggaatgcaaaaacacagctgatgaaatcttataatttaagttgaaaatggataaatagaaaggaaggattttaattaaaaaggtagattaattaaaaagtatataaattataaaaatgaattaatctacattaattagttgatatatcaattattattattttttcagttgcttaaaatatacttgatatatcaactaatgttgttttttaattaaaagaaattttaggaaagataatattaactaggagagataatatcaacattgaagaaggtagagcaatatttttacataattgtgaacattatctggcatgtgtgcattggtgttttaagcaagcaattcaatagaaagatgtgactaaaaatagaaagaaataccataatccacatgtaaagctagaagacataataagtaaaaaaagtaaagatatttaataaaagaaataactaatagtgattaaattagtaaatgctgacaattagcataatcattagtaattattagtattatttaattaaattaattttagcattatttttattaaattaattttaaatcaaattaatgagaaccccataaatttttttaacacttaatttatgatttatggggttatgttctgttttatttcaaagtattaagttcatataaatcagttcttctgtgcttaagaagtggtaactgttgtcttatgtcaggaattaaatctctatcaatgtcagcataaataatacattctttttcatcagcttgagcaattattcttccccaagggtctgaaattcttgaatttccaaaagctatataagaagcattcatatttctagcaggtgcagcaccaacatagaatatctgattatctaaagcacgcattcttatagataactcccaatgggcgggaccagtagtcatattaaatgcagcaggtaagataacgatttcaacacctttaagagccattaaacgtgataactcagggaaacgaatatcatagcaaatagctataccaacttttccatattcggtatctattacagtgacatcatttccagctgtaagagtatctgattctttaaaactaacttttcctgtaacttcaatgtcaaataagtgcattttacgatgttttccaattagagctccatttttatcaaatacatagcaagtattatagatttttccatattctaactcaggaatactaccagaaactagataaattccatgtttctcagctaatttactcaatatcgttgttgtttcacctggatattcttcagcaaatttaggaaaatatttattttcatatgggcagttaaacatttctggcaaaactataattttagctccattgatggcagcttctgttaccatatctacagcatgattgatattttcaattttattttctgtggtcatcatctgacatactgcaattttatagaaattcatagaaattactcctttcaatatttttatgttattataacatattaaataaaaattagatattcttagattgacctaaatgggtatggagagaagtgaataagaatattaaaaggtatataaaagttatttttattatagatggaacccatatattgactttttttatatatgttgatagtattattatagataaaatagaataattaatagagttttatagggttttgcaattattaatgattggcctggtccgagataaaacccacaacatagtttttgttgtgaacacggaaggacaaaaacctgggagatattttataatatttctcaggttattttattggaaaaataagagatacatttgaaaagagggatgagtttatgaaatggttatttttgtttgttgcaggtttgtttgaagtgttttgggcttttcaactaaaaaattcacatggattttctaaattaactccaagtatacttactgttgttggaatgattgtaagtttttattttttgtcattagcactaaaacatcttccacttggaacttcatatgcaatatggactggaattggtaccgtcggtacagctattgtaggcatggctatcttaaatgagcctattagtatatcaagaattgcatgtataggctttattgtggtgggaattgtagggttaaagctattatctactaattagagtatattaatttaaataagctatgaaattaaaggcgagaaaatgtttaaaaataatcaacatttaaaaagtctttacttcatagcttatcttatttataagtttattatatttgaaaattatatgtatatactatttatctaataaaagagcagttaaatccatagggtcaactattacaccatctttataaacacgcatatttccagatgctatttcatctattaagattacttcatcattgtagaatccaaattcaaatttgatatcataaagttcaagacctttttcagctatagtatcacgaactatattagaaattttttgagtcatgcttttcattgaatcaaattgagcttgagtcataatgtttaaagcttctaaaccttcagatgttataagagggtcacaacggtcatcatcttttaaagttgcttctacatagcaatctagtttagcaccttcttcaacacatgaaccataacgacgtaagaaactaccaacagctctataacgacaaataacttctaatccattaccaaaaacttttgctggtagaacttccatagttgcttcttctaaattagcacttacataatgagttttaattccagcattgtttagaatttcaaagaacttaacagatgtctctaaattagctctaccaattccatctatacttagacctacactattttcgcctgggtcaaatactccatctttaccagttacatcgtctttaaatttaagtaagtaatttccattatctaattcaaaaacatctttagtctttccttgatacacttttttcataaacaacctccaaaaagttaaattattatattgaataaggcattagtgtcaaaaaagttctgatattcgcatgaaaatttatattgataccttatatttaatattatatcacaaatagaagggaaatttccgaacaattttataaaaataacaaaaaaagtacattttataaaacttataataagagaactaatataaaatgttagtgtcgtttatattgacacacataagttttaatataagaaacttttgacacactttgacacacatttaatgataattttataaaatgcatgaatgcaatgcttacatatattggcatgaaagttgctttagatatttaacatataaacaatagggatatattctcaaataaaaagtaggggtggttaatagtgaagtcagttagattctatggtataagagacacaagagtggaggatgtggatgtaccaaaaatattagaaaaagatgatgtaataattaaagtaaaagtagctggaatatgtggttctgatatatcaaaatattcaaagacaggtccacatatggttggagaaattttagggcatgaattttctggagaagtggcacaggttggtaaagaagtaaggagttttaaaataggagatagagttgctgtttgtccagctatgccatgttttgaatgtgatgaatgtaaaaaaggattgtattcaagatgtaataatgtagcaataataggaaataaagaacttggaggttgttttgcagagtatacaaaggtgaaagagaggaatttaataaaaataccagatgagataagttatgagactgccgctgcgctagaaccagtatgtatagcagggcatggtctttttagatcagaagctaaagttggagatactgttgtagtacttggtacaggtacaataggattattttcaatacaatgggcaaagatatttggctctacaaaaataatagctgtagatgtatttgatgagaagttagacttggcgaaagagttaggggcagatatttgtataaatgcaaaagaaaagaatattgtagaagaaataaaaaggttaactgatggagatggtgcagatattgttattgaatcggctgggactccaatgacatgtgggcaagtattgttgttagctaaaaagggagggacagtattgtatgcaggtgtaccatatggggatgtagctttgactagagaacaatttgaaaagatagtaagaagtgaattaactgtcaagggaacttggtttggaaactcttttccattcccaggaaaagaatggagtgctggattgtatcatatgcaaaagggtgatatgaatgttgaaaaattagtaacacatagaataaatttagaagaagtaccagcttattttgaaaaagtatacaaaagggatattttctttggtaagataatgattaatatagataattagattagagtactaaataataatccatataaacaaggttaagaaaggtatgattcatatgacagggataattatagccacacatggaaatatggctaaagcaatgttagaaagtgctgaattaatagtaggcaaacaggaaaatgtagaaactttaggattaaaccatggtgacagcatagatgagtttagtagaaggttagaagatagaattgagaaatataaggatgaaggggttttagtattgcttgatttttatggcgggactccatttaatacatctgctattataataaataaatttgctaaggtatgtgagttagaatgtttgacaggtgtaaatttacctatgcttttagagctatttttaaacagagatactatgaagttaaaagacttgaagaatttatgtgaggaagttgggatatcaggaatcaaagatgttaaaactgttttaaagttgtaaaataaattaaaaatctggaggaataattatgagtaatatagcattaacaagaattgatgatagattaatacatgggcaagttattactgcttggtgtaagattacatcggcaaaaaggatagtaatcgtggatgatttagtagtaaaggacccatttatagttcaagttttacaaatggcagctccatcaactgttaaggttgaagtacatgatgtagaatcaggtgctgaagttttaaaatcacataatggagatgaacatttaatagtattggtcaaataccctaaaactgtcttaggtttagtaaatagtggggtagatttaaaggaattgaatgttggaggtatgggagcagggcttggtagaaaaagtttttataaaaatatatctgtgtcagatgaagaaaaagaaatatttagagaactaatatcaaaagatgttaaatgctttatacaaatagtaccagatgcaaagaaaattgatgtaggaacattattataaaaaagactatcttgtaaatctttaaaagaaaatagggaggaagaatatgcacatttcactaattcaagcagtattaatagcaattttttattatctttcttggagtccgtggttgacctatgttggattttttacatggaatagacctctattggctggatttgtaacgggaattatattaggagaccctgttcaaggagcaattataggagcaggtataaatatgatatatctaggttttatatcagcagggggagctcagatgggggacccagcttttgcaggatatgtaggtactgctttagctatagcatctaagctagatgtaagtactgcaatggcaatagctgtaccattgggaactgttgcaactgtactttggattggaaaaatgacagtaaattctttttttgcacattgggctgatagagaggttcaaaaagggaatgttgatagagtagcatttataaatatagtaccaccacagatactgttatttgcaatgagttttataccagcattattagttgtttattttggtccaaatgcgatagatggtatgttggaagtaatgaatgagaatgtgttacatgtatttaatgtaattggggctatgttgccagcacttgggattgctatgaatttaaaattgattggaaacaagtttactatgccctttttcatattaggaatactaatggctgtttattttaaagtagatataatagtaatatctgttattggagtaatacttgctcttacaattacttcaattaagtacggaaaagatagtgctacatcttaaatacatgtgagggggaaaatattatgtcagatataaaaaatgaagtatctaagaaaacgttaagcaaaaaagatgtaataaaatcatggttaagatggtttttctttgcgcaatctaattacaattatgaaagattgcaatcaacagctttctcacattcaatgttgccagtacttaaaaaattatatccagataaggaagagttaaaacaagaagtggagactcatttagcattttttaacacagaacctatatgtggatgtgttatacatggaataacaatagctatggaagaagaaaaagctaatggagcagatgaaataagtggagatggtatgaatgctatcaaaacaggcttgatgggtccactagcaggaattggtgatactttaactcaaggagttataactcctatagtgttagctgtttgtattggtttaactgagggaggagcatcaattgcaggtcctatattatttgtaatagctcaatatataataatgacttcaatttcttttggaatgtggacaaatggatataagtatgggaaaaaagctgttgaaagtatacttcaaggtggaatagtaaataaggttatagaaggggcttctatattaggtactttagtcatggggggacttgtaggtaggtttattaatttatctacaccaataagttatactagtggtgattttaaatttagtcttcaaacggatttacttgataagatatttccaggattaattcctttggtacttactttattagtactctttgctttaaaaaaaggcctttctccaataaaaataatgtttatactgatagtagtgggagctattacaggtattttgggactattttaaataaatatatatgttggtgtgtaaattaggattctatatctattgattatatttgtaagatgttggaaaatttatattaaaaagtttagcaattagggtaattttataatagattaaattttaaacttatataagctatatatagtatttaatattttaaaaagtatctcagaaagatttttaatcagaatgaggtgctttttcatttgcatataaaatattaagtaatttcaaaaaaatataaatttatttaatttaattaaaatattataatatattagttacatattaaaatatataatcgagatattgttaagacattgtcgagatattataatatataactaatgtattataaatagttgtaaacttcctgtaacatatattttatataattaaagtaatggatataatatgaaatataataatgaattttagggatgtgaataaatgaacatattaattgctgatgatgaaattagtatgcttaagatactttgtgcatattttaaaaaagaaaacttcaatgtgtttactgcaaaaaatggggaagaggctttagatattttttatgaaaataagatagacttagctatattagactggatgatgccaataattgatggaatagaggtttgtaaagagataaaggaaaatagtaatacaagggtacttatgttgactgccaaaagtcaaagtgaagatgaaatagaagcactcaacattggagcagatgaatatataaaaaaaccatttgatcctagagttttaataataagagctaagaaactaataaattataaaaatacaattaatattaaagatttaaaaatagattttgggtcaagtaaagtttttaaaggtgataaggaattattattgactaagaaagaattagaattaattcgttgtttaatcaataataaaggaatggttttatctagggaaaaacttttagatttagtatggggattggattatgagggagattttagaacagtagatactcatataagaagattaagggtaaaaataggagaagatataataaaaacttatagaggattagggtatagtctggaggattttaatgactaaactaaacaaaaaattgtccataagtatatctatagtagttgtagttgtttatataatatctataattataaatagtatgtttattcatagatattatttacatgaaaaaagaaatatattggataatgttgaaaatgaaattaaagataaagacatagataaattaaaatcagacattactttaattgaagaaaaaaataatatagatatcgtatatatagaattagataaaaatcataaagataaaggtaatatagataaaataaatcaagatttattaaatgcattttggaaaaaaggtttaagtttaaataagttttggattgaagaaaatagtttaaataatattgataagaaaagtataaataagatatacaatcaaggtaaaacaaaatatagtttgcttgtaaaatttatcaagaaggataattatttgtttgctatatctatacctatagaacattctgaagaaactattggcattgtaaatagatttaatataataatgggaattttttcagtagttataataactatacttacatttatattatcaaacagagttataaaacctatggaaaggttaaagtttttatctaaagatatatctgaattaaattttaggactgaagatataaaaacgaacgatgaaatagaagagctagcttacagcataaacataatgagcgaaaaacttgaaaaagcacataatgaattgaataaaagaaatgagaatctaaaaacttttatatcagatgcatctcatgaaatgaaaactccaatagcacttataaaagcatatgcaataggtatgaaagatggtttggatgatgggacttatacagatacaataattgaacaagcagaaaatatgaccaatacaataaattctcttttatattgggcaaaatatgagaagaaggagagaagtctgtgtctggtagatttaaaggaaaggttatataaaagtttaaaaaactatgagctgttgatagaaagaggtagtataagtgttaaatgcagtgtagatgataaagaacttataataagttcggatgaagatagtatagatatggtatttaataatttgattagtaatgctataaagtatactaataataatgaaatagagattaatctttttgaagagaatgagagaattatattatccataaaaaatggtatagattacaatatgggagatgatatagaaaatatgtggaagcctttttatgttttagagaagtcgagaagtaaggagctttctggtactggtcttggtcttaccatagttagaactatacttgaagaaaataattttagatacagggttgaaatttgcgatggaattatagaattttatattatctttataaaagtaatttgaattaaaatgtaaatataaagaataattaaaaaaatatcgcaattatttgtttttcatatggataaaattggttatttaatatataattacaagtataaataataaaatttatttgtaaaaagagtagcacttttaattctaaaggctactttttttatacaaaaccatgttttttataacaattcattaacataaaaatcaaacttaccttaaaatataaatttacaaatttttcaatcaataagaaaatttctctattccttacataatgactgtaatgtaacaaaataattacaaattaattatgaaatcattatagttagaaacctctttaaaattagatattaagtatcctttagaattagaacgggaacaaagttaaaaaattaagtaatatcaaatggacaagggggaagaaaataaaatgaaaataccaaagaagattgctgcaatgcttacagttacaatgatagctggaagttcaacagcaggcatagctagtgcacaaactgtggcaacaaatttaacagggcaagaaagatatgaaactgctgttaaaataagtcaagatggatggaaaaatgctgatgaggtagtaatcgtaaacgactcatctatagcagatgctctatctgcaacaccatttgcaaaagcaaaaaatgctccaatacttttaacaagtaaagataaattaaatgataagacgaaagcagaaatacaaagattaaaagctaaaaaagtatacttaataggtggaacttctgtattaagtacaaatatagaaaaagaaataaaagatttaaaaatatcttttgagagaatctctggagctgagagatatcaaacatccttagaattagcaaagaaattagatgctataagtgatgttaagaaaatagctgtagttaatggtgaaaaaggacttgcagatgctgtaagtgtaggagcaccagctgcacaaaacaatatgccagtaatacttgctgattctaaaaatggaacagcagttgcagacaaatttataaaagatgctggaataactcaatcttatgtagtaggtggagagagttcaatttctgaagctgttaaaaataaactaccaaatagtacaagactaggtggaacagatagaaatgatacaaatgcaaaagtaataaaagaattttataaaaagacagatttaaaaaatgcttatgtaactaaagatggtatgaataaacaagaccaacttatagatgcactagcagtaggtgtattaggtgctaaaaatcaatcaccagtagttttagttggaaagaacttatcagcttcacaaaaatctctagttaactctaagagttttgataagataactaaagttggtgggaatggtaatgagacagcatttaatgaaatgaagtcattacaagaagtaaaaacagttgaagctaaaacaatttctgaattaaaatcagctatagataaagctactgctaatgatgttataaactttaagccaactagtgaggttaaagaagcatttacaatacaaactgataaggcgataacagtaaacttaaatggtacatatacaaagactgtgactatcaacatgcctaatggtgatgtaaataactatgcaaaagtggatgatgtagttatagatgatgtaaaagatggaacttttgttaactacggaaaaataactaacttaaaggttaatgataaaaatggagccaagatagaaaataattctaaaggtgagattggtagtttaacagtagcatctggagcaagtcaagtaaaagtgactaatggtggtaagataactacagttacaaataattctaaaggaactactatagataataaaggtacaataagtagtgttaagggagataattctccaacaataagtggaaatagtccaagttctaactcttcaggaggaagttcatcaagtggaggttcttcacatggaggaggaagttcttcatcaaaagtagataaagtagttttgaaaaatacaataacagcagcaaataaattgtataatgaagcaatagagggaacaaatgtaggtgaatataaagtagggtcaaaagcaatatataaaacagcaatagacaaagcacaggcaatattagacaaatctggtgtaacacaaaaagaagtaaatgatgcagtaacagcattaaacacagcaacagacacatttaaagcaggaaaagtagtagcagtagataaaacagcattacaagatgcagtaacagcagcaacagcattacatgctaaagcaacagaaggaacagcagaaggaaactatgctgtaggatcaaaagcaacgtataaaacagcaatagatgaagcacaggcaatattagacaaatctgatgcaacacagaaagaagtaaatgatgcattatcagcattaaacacagcaacagagacatttgaagcaggaaaagtagtagcagtagataaaacagcattacaagatgcagtaacagcagcaacagcattacataatggagcaacagaaggaacagcagaaggaaactatgctgtaggatcaaaagcaacgtataaaacagcaatagatgaagcacaggcaatattagacaaatctgatgcaacacagaaagaagtaaatgatgcattatcagcattaaacacagcaacagagacatttgaagcaggaaaagtagtagcagtagataaaacagcattacaagatgcagtaacagcagcaacagcattacataatggagcaacagaaggaacagcagaaggaaactatgctgtaggatcaaaagcaacgtataaaacagcaatagatgaagcacaggcaatattagacaaatctgatgcaacacagaaagaagtaaatgatgcattatcagcattaaacacagcaacagagacatttgaagcaggaaaagtagtagcagtagataaaacagcattacaagatgcagtaacagcagcaacagcattacataatggagcaacagaaggaacagcagaaggaaactatgctgtaggatcaaaagcaacatataaaacagcaatagatgaagcacaggcaatattagacaaaacaggtgcaacacaaaaagaaatagatgatgcattatcagcattaaacacagcaacagacacatttaaagcaggaaaagtagtattaaataaaacagcattacaagatgcagtaacagcagcaacatcattacatgctggagcaacagaaggaacagcagaaggaaactatgctgtaggatcaaaagcaacatataaaacagcaatagatgaagcacaggcaatattagacaaaacaggtgcaacacaaaaagaaatagatgatgcattatcagcattaaacacagcaacagacacatttaaagcaggaaaagtagtattaaataaaacagcattacaagatgcagtaacagcagcaacatcattacatgctggagcaacagaaggaacagcagaaggaaactatgctgtaggatcaaaagcaacatataaaacagcaatagatgaagcacaggcaatattagacaaaacaggtgcaacacaaaaagaaatagatgatgcattatcagcattaaacacagcaacagacacatttaaagcaggaaaagtagtattaaataaaacagcattacaagatgcagtaacagcagcaacatcattacatgctggagcaacagaaggaacagcagaaggaaactatgctgtaggatcaaaagcgacatataaaacagcaatagatgaagcacaagcaatattagataaagcagatgcaacacaaaaagaaatagatgatgcagtaacagcattaaacacagcaacagctacatttgaagcagggaaagtacctactacaattgcattaatgttatcaagaatactaggatttatgaaataagaaataaaaagcaaattatttaataaaatttatatatactttaaatagaaaatttaatttaaggctgtgagtaaaatttttaaaaataaatttatacacagcctttttatcatgtaaagttaattgatatagtaattttagataatttagagatataaaatttaaaatgttagataaagttcaaagtataacctaatatcaaaacttcacataattttcatattaattatcaattaaattcacacacaagagttattatataaacatagaagatagtaaaactagcttaaaaacataatataataccctatacaaaatagtggcaactctccctcacatcctcaattgttgccactattttaattttttgtaaaaaacaaaaaaactccacaaagtggagtatttataaatttaatatactcttttaatagtatgctttactatactttaaaacaaacagaatttttaatctcaagttttttatttatcttagcaaccttaatcttaatcttatccttcaaaggaatacatcctatattactttcactttttacatcaacacttccaacaaatttaccagagtcattataatactttgcaacaccaacaatatctcccttatggataggataattcatatttttaaacactaccttaggattgatattttcgttatctgaaacaacaccatacaaatctttatcaaccttaactgttatcttaaaatcatcaataccatcaacacaaggagtctctataatatcacccttatgtgctatctttttagaatggaaattatctttaccatatttcaataaagtagcggaagaagaaattctatttttcttgttaccatcaccaagtacaacacctatcaatctatgatttctttcgtttttagcatctttaggtaccatcatagaaaatgcaaggcaatatccagcattatctgtatagcctgtctttattccatcaacaccaggtactgaaacaagtaggggatttgtgttataatgtgtaaaatcctttttagtatcattatatacttgcatagtggttattcttgtaacttgattttcataatggtcatacatatactttccaagtgtaactatatcgtgagcagttgacatattttcaataggaggttctttatgttctgggtcagtatatataggaagcccatttggattaaaataatacgtatcaatcattcctatttcttctgctttcttgttcatcatatttacaaaattcttttcagtcttaccaatatgtttagctatggctatagcagcatcatttccagatactagcattagaccctgcataagctctcctagagatatttcatcaccatctttaagtttacaagtagaacctcctactgaagctgtagacttgtctattttcaccatatcagtctcttttacttgattcttatcaactgcttctattgccaataaaaaggtcatcattttacttaaactcgctaatggcattttttcatcaatgtttttttcaaataatattcttttagtttcctggtctataagtagtgctgctcttgaagaatttggtactggtggagtatctgcaaatgcaaatacaggagttataaatataaaaattaatgcaagtattgttaactgttttatttttcctttcaaaatctcgtcctccatttcatatattaattaatatgcacaaaataagtgctataaattttatttatttagatactcattaatcatgtctattatataagcaatttcttcgtctggtatcaaaatattaaaataagcttctgttggcttaaaggcttcacgtattaaactatatagttcatgatttttactaattaattcagtaatgttattatatggaaaagttgtatttttaaaacatctttctatcataaaagagcaatgtagtatatatcctagcttaaatttgctctttaagttttcatctattaattctattattgtaaataaggaagaattgacatagttgaataatttaacagagtccaaaagttctaagttttgggtcataaagtttattattaaactgttgtatgatagatttgtttcttttatatttgtaatactattggcattgaatgtaccttctattattttgtttagcatatctaggccatatccatttagtaattcctctatgtgtataaaaggggtgttggctacattaaaatctacacttccaacaactgccagaattttagtattactaaatttattcttatacattttaaaactttctatattatgaggaactaaattaatattgtatttacgaatatttttaagtgaagaatttataaagtctgctactttcatagctgaaccatatcctgttatacaagtagttattattacatactctcttgacttttcaggatagtttatttctgttgaatcgattgctgctcgtccaatatatggatttaaagagcttaaggaattagctaattcatccaaagtcatttctggtaatgtactttttcttactgcttctaaaactattggagtagataccatttcaattgagcgagttttgatttttgttttttctgaaataagttctccaaaagctataagagagcccatatctgttaaaagaagtacacccttaccttcgtcacattcttttaccaactctatagttttatcaagtatggtacttacttttacatcaagaggcatgtcaattgcattacaatggtttgtaccaagcaatgaatttgctacatcacacatactgcttgctgttgaatttccatgagcaagtattatgactcctatactttcagattgattgtttggttcaagatacatgctatttagaaacatggatataaattttacttcatctttaggtaaagatgtttgtaagtcattttcaattatacttaaaactattttagatatatttaaatctttatctaagaaaattttatcattatataaattgtacttaggattataggtgtcttgatttatattttctataagtgcacttatatgcattgaaagagcaatataagtttgttttgtgtatttgtttctcgatattttttcggcctcttttaaagaatgttcaacagcatagtaaatctttggattgattactttaaaaatttcattacttgtataatcagaatgagttactgaagatatcgaaagtaattttgtagagtacttttccatgtaatttataaacatactccttatatcattttccagataaggaatctctgtagagtatttaaatccattgtttgatgtatctatattgtatttagatagttcttttgtatattcaacttctaagttattaccattaaattcataaaaaagcatataatcaagttctgataatttatttagattactacgattttcattcaattttaaaagaccaatatagatgtaatcaggaacaagggataaatctatttctatattatccttaagtccagttttgtaatttaaaaaggctcttgcactcataagttgtatgtcagatttaagctgacctatattaccaaaacaatcataaaggagtaatgatttaattacatctttgtgaacttttatagttgcattggtgtattttgattctataataaagaagtatttaataagagataatctttcttttaaagacctatcctgtaaagcaggtaggttgattgtaacagggattcttcttaaaaaagtcccaagcagagaagaatgtatatcttctgttgtggcacacacaataaagacattagctttgtgcacaatgtcagattctcctaatcgtctgtatatgcctttgtccatcaaaagaaaaagcatctcttgaccttctggtggtaatctgtgtatttcatctaagaataatatgcctccatcagcctgtgcaactatgccgaatttatccttattagcaccagtaaaagaacctttgacataaccaaataaattacttaataataagttagcattttctgcatattcagcacagttaaatactacgaatttgctttcagaagaaaagattttactttctacagcatatttgtacattgtttcggcaaatgtactttttccaacaccagtaggtcctatgagtaacgtattaagaccttttggaggatagagtatagcagatttagctttttctataggtagtttaagactagaatcatgtccaagtaatgttgaaaaaatatcttctgagtcatttttacttgatttaagtagctcattacaattatttatagaaaattcatcactgttcaaagtacggccaattaaattttctataatactaacatgtagaaataaaattggcttaccagatattttcagaacttttttttcattatataggttatttaattctttactggtattacttctatcaagagatgaatggttagcaatttctattgtagtgaatcctgttttatctgattgaaggtcttttaaagtcatattttcacataatttatgtagagataatagaactttatcttttcttagcatataccatttcctttctttatgtttaaactatatttaagctacattaaatatattataatatatattcagtattaaaataaggtttatagtggatattttgtattttactttttaatatgttgttttgtgtaatagatggtgttaaaataagagttgcattatattaggtatggatttttatagattaaattagagtattatgttgttaaataactaaatttaagttttttaatatacttcagtctatgtaatatcatttattagtatatggtcaatgtaattaatatatggtcgatatagatgaagatatatgaaaaaactgataaggttaagaataatttatatatacacagttaatacatatatacgtttacaaattatattttgtatcataaaaataatgttttatattgtacatatataaatatgaagttgctataagcttaaatactcaagagaaagaattaaaagagatataattttatttgtagtaaaaagttatacaatttagaaggttatataaatggttgaaagtgtttgtcaaatattaattcagccattttatggtgtaaacaagcttaaaatttgattttgacaagcataaaaaacaagttttttcataaaatgtaaatattggatatgaattatttaaaatagtttaaataaataatatcttgtattaaaatatgaataatactataaaagaatgggagatatgttttgtggatatagatagaattttaaacttttcctcaaatgcaggtaaagctatgttgcaaagtggaggagaaacctatagagttgaagaaacgatagctagaatatgtcaatcttttggaatagaccacgtagatgtatttgcaactccaacagctgtaatggcatctgtatttgtagatgggaaattacattcagcaattaaaagaataagctcaagaagagtagacctaaacttggttcatgaagttaactcattatcaagagcaataagtataaataatttagatattgaattatgtgagaaaattttagatgaaataagtgaagataactattactcggatttaataacaatattttttgcaggtattgcagcagcaactttttcgatattatttggaggaaatgtggaagaatttatagctgcatttactgttgggattctgactaagtttgttattatgtatttaagtaaatcttcacttaatgacttttttgtaaatgcaattggagcagttattatagcttcttgttcaattttaattttaaagctcggatttataaagacgttagaccatttaatagcaggagcaataatgctcttagttcccgggcttgctttgactaatgcattaagagatttgttagatggacagttgatttctggtcttgcaaaattagcagaagtattttttgtaggtgtatctatagcagtaggaatgttcttggtacttggattatacttcaagttaggggggatataagtgcatttgtttatagaagtaatagcagctttttttactgccttaagctttggagtgctatttaatatgaaaggaaaaaacttaatactagcaggaataggtggaagtatagcttggttttcatataaatttcttttaaatatgggagtaacagaaaacttatgtttttttatagctacagtttgttttgcgatatattgtgagttatgtgcaagaatttatatgactccagcaactacattaagtgtttgttgtttaataatattagtacctggttatggaatatataatactatgtattctgttttgaccaataattatataaaagctgtagaatatggggtgagtacattatcatgtgcaagttcaattgcattaggattggtatttataactactgtatttagaaaagtcaacttatatggagtgcttacaaagataaaagaaaatgaaaaatataaaaagagtataaataaaattaaacaacaaaaatagaaaaaattgacttttaaacaaaaggatgataatataataacataaaatagaataagagtatccaaattaaagaggatattcttattctataaacgtaatttttttttatttcaaaaaactgacaacttgcattacgagtgtaagttttagaactcagtttgtaccaaaaaatttgtaccaatgttaggaaccttaatttaaaattaaaagggggaagatttcaagatggaaaagctgtcggataagagaagagtcaaggcagtaagtatggaaaccttcgtatttattgtactattggcggtaggatttggatatgtaggaagcatcatgggtgcaggaatgatgtttaaagtaataatgagtacagcacatgcgcttttattagacacagtatttttaataatggctatggcagttcttgcaggtgcacttagtgcgttgctttcagagtttggagtaatatctttagttaataagatatttaagggtcttatgagacctatatggggcttacctggtgctagtatagcaggagtagttgcaacatatttatctgataatccagctattataccatttgctaaagacaaaacatttacacaatattttaagaagtatcaagtacctgctttatgtaatttaggaacagcctttggtatgggacttattgtaacaacttttatgatagctcaaggtaaagaatatgtactaccagctataataggtaatgttggggcaataataggtagtattattagtgttagaattatgttgacttttactaaaaagtattataattatgaccctaaaaatgatactgaaaagcaaataaatgataaaggtgcaaaacttgaagagtttagagaaataagagatggtaatgtattccaaagaacattggatgctatacttgaaggtggtaagctaggtgttgaaatgggtatggctataataccaggagttttagtagtttgtacattagttatgttattaacttttggaccatctacagaccctgctacaggtcaagctgtttacacaggagctgcatatgaaggtataaaattattacctgctattggtgataagattagcttcataatagaaccattatttggattcacatcaccagaggcaatagcattccctgtaactgcattaggagctgttggagcagcaatatctttagtaccagagtttataaaatcaggcgctataactcctaatgatatagcagtattcacagcaatgggtatgtgttggagtggatatttaagtacacacataggtatgatggatgctttagatgcaagaccattggctggtaaagcgatactttcgcataccataggtggtttgtgtgcaggtatatgtgcccactttatatttatgcttgttggatagaaatgttccataattgaagtattataatttataaaattgaataaaactattgatttaagtatgtaaaaactaaattagtaatttaaatatataggtgctgttttgaaatagagatttattttcattttaagacagcaccttttagtaatttaagtacattaattaaatgtattgattgaatttattatgataaaattgtattatataaaatagagccaatttaaacagtaacaataaggaggaattgtagtaaatgaaaaaggaacgactacaacatgaagacttaaaagagtatgattatgatgaagatggctatctcagtaaaaagataattattaaggacttcataaaaactatattggttatgacaattgctactggaatatcagtagtttttgaaaaggtaggttttaatgaatctaatattatactagtatacatattaggtgtactatttgctacaagtataacctatggatatttttttggaatactttcttcagtaataggagtgctatcatttaattttttctttacgcatccattatatacttttttagcttatagaaaagattatcctatgactttttgtattatgctaatggcagcaattataacaagtactttaacttctaggataaaaagagaagtgagactttctcataagagagaaaaaatgataagattgctctatgagaataacaaaacgttgcttaaagcaaaaaataaaaatcaaattattgaattttgtgggtctaatttagtaaatatattaaatagaactgtaatagtgactattgcagatgagaataataatctaggtaagccaagtatttatatttgtaacaatgatggaagtgagaatatattccattcagtattagaaaaagaagctataaaagaagcttttaggacaggtaacccagttggaattgggacaaaatattgcaaaaacagcagtgcatattatttccctataaaaggtcaagaatcaaatgttcttggtgttataggtgttgcgtgttttaagatagatattattacagaaaatgaaaagatactattagaagcagtttcaacacaggttgcgttggcaattgatagagaaaatttatttgagaaaaataaaaaagcaaatcttgaggcagagagagagagattaagaggaaatttgcttaggtcaatttctcatgatttaagaactccacttacaagtatattgggttcgtcttcaacaatacttgaaaatgatgatgtgatagataaagaaactagagtagaattattgaaaaatatatatgaagatacgagttggctaactcattctgttgagaatatacttagtatgactagaatagatgaagggaaattggatattgaaaaacgaccagaagttgttgatgaaataatagctgaatctatattaagagtcaaaaagtttgccaatagtagagacataaaaaccaatattccagatgagataataatcgttcatgtggatgtattattaatagaacaagtgttagtaaatttaattgataatgctataaggcatacacctaaaaattctaagatagaactaactgtaaaaaaagagtcaaatcaagtgctatttgaagttgcagataatggaaaaggaataccaaatgaagatatcggtaatatttttaataggttttatactaagaataagtctagaaatcttgaaagaagaggtattggtcttggattggagatatgtaaatctatagtagaagctcatggtggagaaattgtcgcatttaataatccttctggaggagctacatttagatttagcatacctatgtatgatgaggaggggaaagacaagtggaaataaagccattagttctaattgtagaagatgataagccaatttgtaaatttataaaagtatctcttgaaactcaaaattataggtgtgtagagacagataatggaggaacagctatatcacttatacattctcttgacccagatttgataattttggatttaggactaccagatattgatgggattgaggtaataggacgagttagggcatgtgcaaagactaataaaataattgttgtttcagcgagagagcatgagagggataaggtggaagctttagatggaggagcagacgattatttaactaaaccttttagtgtaacagagcttttggctagagtacgtgtggctcttagaaataaagctcaacaggataatataaataatgatgctccaaagtcttttgaagttaaaaacctaaagatagattatgaaaatcatattgtgtcaattaatggtgaagaaatacatttaactccaatcgaatataagattattgagttgatgtctaagtattcaggaagagtcttaactcataagtttataatagataaagtttggggaaattactatgaaagtgaaaatcagtcgcttagagtttttatggcaagtataagaaggaaaattgaaaagaatcctgctcagccagaatatattttgactgaggttggggtaggttaccgtatggcggatgaatagatactaaatgattagttgctgagtgattactaaatgaatatgagtaataatcagatagaaattatttgttatgtaagaaaatctaagtattttaaatcgaatacaaatagctatgtatattttacaatgaaatggatagagagttaatctatctaatcttgaatttacatagctattttatttttttaagagaatacaaagtggatgatgtatttctgtaatagaaaaagtatccaattttagactaattacttatgtaatattaacttgtaaagttaggatttgcctatttcattttttcttagttttgacttgtcttacagctatcattgtagttgcaaaaaaactcaatgttgcaccagcaaatgctgggtaatgtcccataaatccagcaatacaaaaacatattcccactacaaacaacaagaaactaaatattttcataactattctcccactaaaatttaatttattaagcatattttagcagatattaatagtaaaatcatcagttttgatgacaggaaaagtatatcatattttatgctttattatgtcttcttcgttgattacttattagaccacactttttaaagtgtgctaagtgttgttttgcaacaaactcttaataactatatgctaataagtgtaagggaagtaagtagaattgttaaatatagcatctatatggataatatcaatttatatatggataatatcaatttaacattttttttgatataaaaaaattaccctttttgtctttttatatcagcctttgtgatattatataatatatcaaagtaacaatctagataatttattattgaagaaattttaatatataatagttttatatttttaaatgaatgaagtattatcttcatatatgattggaatacttaattgaggtggagatttgtcatttatatgagaattaattgtaaacacataataagatagttaattataaatatattaaattaggtattacaaaactctattgtacgattgacacaataataattctatttactaaaaaatagaactttattaaggtactattttaaaacataaagaagtataatatcattgccaaatatatagcaaaattttaaaagctttaaaaattcaatctggaaaatgaataaaaggagatatatataaatggatgtaataaatttaatagatgagttggatgaaattgtatatgtttcttctttagatacatatgaacttttatatattaatgaaattgggaaaaaggcaatgggaattaatgatatatcccatgtaaaatgttataaagcattacaggggaaagattctccctgcgaattttgtacaaactctattttaaaagaagatgaatattacatatgggaaaatacgaatactcgaacaaatagacattttatattaaaggacaagttaattaaatgggagggcaaacatgcacgattagaaatagctcttgatattacagaaaaggaagatataagtaagtcaatagcagaaaaattagagataaaggagttattagttggatgtattaaacatcttataacagaatctaatttttctgatgctgtaaatcttgtattaaccaatattggtaaatttcataaagctgatagagcatatgtttttgaagtatcagaagatagaaaaaaagtaactaatacatatgaatggtgcaatgaaggtgttgatgaacaaaaacaggcactaacaaatcttgatattaatgaattaaagaattggtttttattattcgaacaaaagggttttgtaataattgatgatatagaaaatataaaagaagaacagccaatagaatatgaaattttaaaacctcaaaaaattgaaagtttaatgacatcttcactaaaacaagatgataaagtagtagggtttattggagttgataatccacataaggctgttggagatacctctcttttgacatccctatcttattttttattaactgagatgaaaaaaagaaaagtagaaaataaattaaattatatgagctactatgacttcttgactggtgcatataatagaaacaaatatattaagtatatagataattttcaaaaaggaaaatttaaatccataggagttgtatttgtagatataaatgggttaaaagatattaatgataactttggacatgctaatggcgactctgctattgtgtcagcatgtgtaataataaaaaaatactttcattcttataatgtttaccgtattggaggagatgagtttattgtattatgtgaagatatatcaaaacaactatttgaagaattagtgagttggttaagtgaagaatttaaggatgagatgatatatagtgtagcagtgggcagtatttggagtgacgataatattgatatacataagctaattaaagttgctgatgagagaatgtaccaagataagaagaggtattataataagaacaaacttagaaataatgaaatggaagtaattagtgacttagctgattcgacgaataatattttatttaaacataaagagttagttgataaggtttattttgatgatttaatgataaaagggtattctaaggcttatgaaaaattagcttataatacatatgatataattttatctatttgcatcgatactaatttaattactccaatttatcaatcagagagcaatatttttagttttcctataaaggaaaatcttgaaaaaactttttcatacataaaaaaacatttaattcatcctgatgatataatattatttgatgataaccaccttctaaaatctcttgatagtcttaataacagcaagcaagacgatttagaactaaattttgagtatagacgtttaggaatagataaaaagtactattgggcattaatttatatgttaaagattagtagtaaaaataagttaggtgagaaacaaacacatattttagttgctataaaaaatatagattatcttatgcaactacataaaaaccaaaaggatatattaacaggactatacaattatgaaagtttttgtgaacaaacaagtttaatgcttaaaagatatcctgacaagagctatgcaattataatgatggatatagataagttcaaggtaattaatgacatttatggagttagaggaggagataaggctttaatatatgttgcagaattgattcaaaaaaacattggttctaatggtatatgttgtcgtatgtatgcagatgtattttgtattttttatgagagttactctgatagagatgttcataaattaatttataagattaaaaatagcttaaatagaaaaaaatttgaatatatgttagtaccatgttttggggtttataaaattttggataataatattccaattacaaatgcgtgtgaaatggcaggatatgctcacaaaaaagtaaagaaacaaagtatcaataactatatattttatgatgatactataagaaatgatgcacttgaagaaaaacagatggaaagggaaatggaatacgcacttgaaaatgggcaattccatgtatatctacaacctaagtataatcttaatgcaaataaaattgttggtgcggaagcattggttagatgggttcatccagaaaaaggtataatacctccaattaaatttatttcactatttgagaagaatgggtttattatcagattagacatgtatgtgtgggaacaagtatgttctttgattagaaaatggatagatttaggtgaagagccagttcctatctctgtaaatgtatcaagattacatttgcataatccacattttaaagaaattgttttaagtttaataaataaatatagtataccaaaatcttttttagaattggagcttacagaaagtttatttattaaaaatataaaattatttactaagataatagccgaccttagaatggatggtattgttttaaatatggatgactttggttcagcatattcttcattaaatatgttaaaaaatattaatattgatacattgaagatagattgtggcttctttaatgaggaaggaatcacagacagagaaaaaatagttttaaggcacactatagccatggcaaaagatttagatatggatgtagtggcagaaggtgtagagacaaaagaacaagctgaatttttagtgagtttagattgtgtggtaattcaaggttattattattgtaagcctattccaagtgctgattttgagaagttactttatcaaaaataagctaattatcccactctaaatgtaggtaggatggagtagttcaacataattaaatagaagtagaaaatagtgaggatataatttttaaaaagtataatatttatggattaggagcgaagtttatgatagtgggtattataggtccttcagactctgggtttaagataaaggatgatttaaaacagatagacagtgatttaaagactaaaatatatgtaagagaaaaagtagtagatacaatagaagttatttctaaatgtgaagatgaatgtgatgctattatatttacaggatgtgcagtttatgaatttataaaatctaagtatgagataagtaagccacattcatttgtaccgagaagtgggacgagtataatgaaggcattttgggcaataaaaagtgcaaatataaaattagataaattcagtatagatgtagttgatagatatgttgtggaagatgcacttaaagaatttgatattaaagcaacgagtgtattttgtaatccattttctttggaagtaggagagtctgaacttgtagaatggcatataaaattatttgaagaaaataagacggatataatgttaactggttttggtgcagtatataatgaattaaaagaaagaggctatcctgtatttcgtttacaagctactatacaattaatcaaagaaagttatgataaggtaaagagtgaatatgctctaagcaaggcaagattttctcaaattgctgtcgaaatattgagtctaatagattataaagagaagatagataactattattctgacatgataaaaaaatcagatatggataagcttgtagtaaactatgtaagaagcattcaaggttccttatttttacttggaagaaatgattatgttgtatttgttcataaaggggtagctgataatgagtataattatgataagctattcaatctaaagagagagataaaagacatgggcttttctcttagtataggaattggtactggagtaactgcgtatcaggctgaaaataatgcacataaagcattaagacactccatagattcaaaagaaattggtatatatttggtagatgaagatgaaaatataagaggacctttagcttccgaaaatgaattaaattattctttgatgctatctgatgaaaaggtaatagaaatatctaaaaagactggaatgagttgtgagtcagttgcaaaaattattgctataagtgagaatagaaaaagtaagatttatgattcaaaagagttagcagagtatctaaatgtaagtgaaagaagtgcaagacgtatattaaataaaatagtaaatgcaggtttaggtcgaatatgtgcaaaagagactagtattggtggaggaagaccaaaaaatattactgaaatactgttttaagatattttataaaactgtataaatcattatattttataaaattctacaacaaattactatataaagtattaaagcttatcatgaaaaaaattagaacaaattattatataaaatactagagcttgttattaaaaatactagaataaattattaatataaaatactagagcttgttattaaaaatgctagaacaaattattataaaaatactaaagcttgttattaaaaatgctagaacaaattattatataaaatactagagcttgttattaaaaatactagaacaaattattatgtaaaatactaaagcttgttattaaaaatactagaacaaattattataaaaatactagaacttgttattaaaaatgctagaacaaattattatgaaaaatattgaagcttattatgaaaaatgttagaacaaattactatataaaataccaaagcttattatgaaaaatgttaaaataaattattatataagatactaaaacctatgtaaaacaactttaatatataacttataaagttgaagatacataggtttttatttttataatttaaagaggtatattatgatatttataatttaatcatatgataaactattttggcagtatcatataattcgtctatatttacatattcattaactgtgtgtacatcatacatacctagacttaatatagcacaattatatccaagattagctaatatatttgcgtcacttccaccaccaattaccattggatttggaacaacaccaacttgtcttattgcttcttcacttaacttgaaaacgtgactatctctactaagttcaaaactagggtaagacatactatgttcaaaggtataagtagtattaaatttagatgcagcatccttacaacatttttccatatgattaagctcatactctaaagtttcaggtatatgagacctaatttcagcagtcaatgtaaccttatcagttactatgtttgtagctccaccaccttctattttacctatatttgaagtagtcaatggatctattctgcctatgtgcatattgcttattgcatgagaggctactaatatagcatttaaccctttttcaggttctataccagcatgtgctttctttccatgaaaagagatttttatagattgttgagcaggagctttgtatgctatcgaaccaatagctccaccagaatctaaaatcaccatatctttacaaggcaagttgtcaggattaaagtttttgacaccatgcataccagcttcctcacagattgtaaaacaaagataaatatctctatgtggtattttttctgtagtaacatgttctaaagcttcaagtatagcagctattccagctttatcatctgcaccaagtgtagtagttccatcacttctaactacattaccatctagtattggttttacacctaaacaaggttgaacttggtccatgtgtgcacataaacaaagtggtctacttccttcttcaccttttatataggcaatgacattacctgtattaccaccatatttttcacctgcatcatctataatggcatctatatttctttcttttaagtagtttaccaaccacttagacatttctaattcttgattagatgggctatcaattctaaccatatccataaaattatttataagtctatttttatctaacataaattatttctccttttagaaagatttaaataaattacatgctatatgaaggaagtattccaggtcctagtggaatattaaataccataaacaatattaatagtatagtccacactattaagaatgatatagagtatggtatcatattagcaattacagtacccataccagcatctttatcgtattttcttgtgaatgctagtataatagggaagtacggaaataatgggctaagtggatttgttatacaatcacctatacgataagccatctgagtaagtgctggattgtatccaaccatcataaacattggtacaaatataggtgcaagaatagcccactttgcagatgcactacctataaataaatttataaaacatgataatataataaatcctatcaacaataaaggtccatttattcctgctgattttaaaaattctccgccctttacagctagtatcagacctaaattactatttgtgaataattgcaaaaattgtgaagcagcaaatgctagtattatatatccacccatatcactcattgcactagccattatagagactacatccttatccttctttattttacctatagtttttccgtatacaacaccaggtatgaaaaatgctagtgctattataggtaccatacctttcataagaggagcattgtttgatagtaaatctcctgtttctgggtcagctaagaatggttttttaccgattacactaagagctactataatagctacatatattaatatacttataccagcttttttaagccctttcttttctacatcactaagacttccatcaacatctagttctgcatttccttcatatttaccaaatctaggagctacaattttttctgttacccatgttgccaaaagtattagaacaaaagttgatgctatcataaaaaataagttcattgttgcattggcttgaaatccagaatcaatcatttgagctgctggaactgtaaaacttgcagcaagtatatcattgacacttatcataatgtttgcggcaaatcctagacagactgctgcatatccagaaaataaacctataagtggatgtctaccaacaccaagatatacaagtgcagctaatggtggaaataatattgtacctgcatctgaagctatattggcaagcatacctatagtcattacaacaagagttactcttgtttcaggaatcttgcttactgatgctttgattgttgctgtcataagtcctgttttgtcacatacaccagcacctatcatagttactagaactagacccaaaggagcaaacccttggaaattgctaactatgtttcctaaaagaatttgaagctgttctacagtcaataaatttactgcagttatagtttctccagtaccaggatgaactactgatatccccatagaaccaactagactagatagtataagtaaaagtacacataaccctaaaaatattgtaactgggtctggtagtttattaccaacagtttctattctgtttaatgtcctgtcaaaaaagtttttcttcttaactacgttatcattcataatatcctccctaatgtttaaaaatataattaaaaaataagtattgtggttgatcttacaatataaattctgcttgtcgatttaagacgtgtccacaatatgtcctaaaaaaagtataaaataaactttttcctgtgtcaatgcagttttctgaattttctggttgagtggtgttagttaaatatgctttaagtagattaatgacgaattatatctaatgtatttaaatagcatatgcactttaaagttaattttaaaacaaaattttatgaaaagctagtggaagattaagttattaaaataagtagcgtagtaaagtgttagattttttaattaatcaaagaaatttactttgtattttctacaaaaatctgtgaatatcttttgaattatgtagaggatataaatttattttatttacatagattagattttgttctaatttactgtattcaaatggttttccatgtccaggataaatcattttaggttttgtattgatgattgttttccaagattgaataaattctagtttgctttctgcaaatatggtaattttgtgagtacttggaaatccattcattgcagaatctccacaaaataaaacaccatcatcaattagtagtgaaattgaatcagcagtatgtcctggtgtatctataatttttccatttagttctttttcaatttctttacgattcttgtcagacacaagaatacaccttttttcaaattcttgtttaagtggagaaaaactatgctcaccttttccaaatagtttcataatttggcaaaagagaaaggcagtacggctgttacaaccaccaataaaagagttttgacctttatatagaatttctaaagctttatcatgcataacaatctttgtattaggagattcgtctagaatctgatttagaaaaccaacatggtcatcatgagcatgagttagaaatatgtatcgaatatctttgatttttatgttgaatttagaaattcgttttttgaaatgtttaaaaccattttcatatccagtatcaatcaagacaaagccatcttgaatagggtacaaccatgtatttataattcgatttcctgcattaaacattttttcaccaccttgaattagaatataaatttatattaattagaaagaatatagcatagttctactgatattttaacgtatctctaaaagttttaaggaggataatatattttagtttaatctaaaagctaaaagaaaagaagtatactgttacaaaaacaaagagtggtataacttttacagtagataccaccctattataaaaatagacttataaagttttatcgtgtttttctaggaatgttagatattcttctttagtcataactggagtaaaggtatctaatatatctttagcatccttagcattatcaaaaagaaggtctacaactgtaagtgccattgctttagcaggaattatgtaagctaaatcttcatcaactatttcaaaatctcttgtatgaagagctccttttacaccaccaatcatagggtgaagagtaggcattatatgagacacatctccaaaatcaaaagagcctgtaaaatctccaccatcaataacttttccttttagacctaaatcttcaagattgtttttaaataaattatcaagacttttgtatcgtaatattggaagatatccaggaatttcagttatctcaacatcagctccaactgccattccaccagccatcaaagccttatttattctttcattagcatcaatcataccatttatagttctagctctaacatatgattccatatgaacatcagcaggaacaacatttactatatctccaccttttgtgatgatagggtggaatctaactctttcagactctttaaaagtttctctaagtgcattcacgttgtttatagcaagcattgctgcatttaaagcatttattccatcatgtggagcagaaccagcatgagattctttacctataaatttaaccttttttccaacaaatccattactctcaggaccaactagagccttatcttctcctaaatcagaagcatgaaacatcatagatatgtctatatcatcaaaataacctctttttattaattcttgttttccaccaaaataagttatttttccttctttttttaattgctctctgtattccaactcaataaactcttcagcaggagtagccataaaagatactttaccatctaaatgttctaaaacgccactttttactaaaccaacagcagcacctaacattccagctatttgaatattatgtccacaagtatgagaagcacctatttcattagcatctttatgttctttacatgatataccatccaattctccaagtatagatatatgaggacctttcttgctagaatttgcatctgctttgcatcctgtaactgctatatttttttctacagataaatttaattcttgctcaaaaaagtttgaaacagcttctgtagttttaaattctttatatccatattctggatttttgtatattccttgacctatttttaatattttttctctattttcatctatagtttttattactagagattttaattgttctttattcataataaattcctcctatattttaccttgaatacttaaaactatatgagctatactcgcacatgcaaagaatatagttgtaaatacaataagtgaaattataactattttccatgacatttcttttaaagcttctattttgtttccaacagaaattcctgcaaaagctagtagtggagtagttatagccataaagttaatattattagtgttagttaagaatacttcagatgttggactatatggcatactaagtaaaaggccgattatagttgcaaatccaaaagctggaaagattgatttaggaaataaatcttttataatcatagctgccatagcagctaatattagcatcaccataccaggaagagctgtaactatagatgtaccaacgctaattctttgtcctataagaattataactccaataacagacataaccaataattgatatgaacttttctttaaatttaaattagcaaacatttattagcactctccttctgtagatttaatttctttagtttttttatttctcgaaaatttaggttctaaaatcttatacataaaattagtaaatggtaaggatacaaaaactaagaatataattcctgttatactagacatcatattgcttgttgcagcataggcaagtattgtatctgccatttcaggtggtaccatggtagataatgaaccagcagctgctgtcatcatacttccactaccaacaccacaggccattcccaaagcatatgggtgaagaccactataaatagatattgaacctagtacactaaagtatatagtaccaagaactgttcccattaaatatgtaccaagtacaccactaccttctggtgagtttatcccatatttttctgatataactcctaaagaaggttcacgacttatacttgcagtagctccaacagcttctcttttcattccaaacattaatgcaagaggtaatgcaacgattggtgcaagtatatgaccaaattcttgagcgataaatgctggtccagcttgaattattttgtcaatgtttggtccaactgtagtaccatattttataccaagcattactagtgcaattccaacaacttcaccagcaatatttatttctttttctccaaccacttttttaagtgctttaatttttttacctaataaatctggtgttattataagtccaattataactgcataaagcatagggaacagtactatagaggcttttccaatagctatagttctttgccctataaattcacatattactaccaagattaagcaagttaaaaatacttgaataaaatgttttttattaatttccatgatttcctccccaaaagaataaatattttacttatctgaaatgagaaaatacgttttcttaagtataatacgttttcctaaataaaatgaaaaaactatttcaaataagtttcagaaatgtcaataacatgtccttaattaaggataaaacaaaaatttaacattgtcaacgaaaaatatctaaaatattacatattttgaatatattgtaatatagctttattatgaaaaaattgtttaaatattgtaggaataatagctaaaaagctttaaaattagtaatataaaattgaaaaataataatatagagttgagaaatagtaaattgaaattttaaaataaatgagtggaagtagcttagtaaagtatggaaatgaatattacaatagaaaataaataatatgtaaagactttaaattaattttaagtattaagtacaaatactaatttttgatatagaaattgaataaagtaaatgataataagcaaatgaattaagatgataataagtgaattgatatagaaataagtaaattaagtaagatgataacaaatgaaatgataataagtgaattgatatagcaataagtaaattaagtaagacgataacaaatgaaatgataataagtgaattgatatagcaataagtaaattaagtaagacgataacaaatgagatgataataagtgaattgatatagaaataagtaaattaagtaagatgataacaaatgagatgataataagtaaattgatatagtaataaataaattaagatgataatatccaaagtgagaaagataatagaaagtaaataaaatcatgtaagaataatttagataagattctaagattttatttatttaaaaattagtatgattaatttagattaaataaatttaataattttagtaggtggtaatgaatgaaaataaatagattaacagaaataatagtaattctattaaataaaaaattagtaacagctaaagagttggcagataggtttgaagtttctacaagaaccatatatagagatatagaaactctgtctatgtcgggagtaccagtatatatgacgaaaggcaaaggaggagggatatctttaatagaagaatattctatagacaaggccatactgtcaaaaaaagataaagagagtttaatagttgcactgaaaacattacaggcgactaagtatccagaaataaattcagtagtaaataaaattggctcaatatttggagagcagaatttttcaaactggattgaaatagactttactgaatggggaagtaattttaatgaagatgataaatttacaaaaataaaagaagctattttaagacgtaatactataaattttaattatgtaaatagtttgtcaagccagacaaacagaactgtcgaaccactgaagcttatgtataagagtaagacttggtacttgtatggattttgtaaactaaaagatgattttaggatatttagaattagtaggataaggaatttatctataaaggatgaagtattttcaagaaagataatagaagaagtatgtttgaatgattctaaagtaattaaggaaaatactataacgttgaaattgaggtttaaagaaaagatgctttttagagtatttgatgattttaataaggatttaataactaaaaatgaagatgatacatatgatgtaattacagaatttcctattggtgaatggatttatggatatattttatcgtttggtgacaatgttgaagtacttgaacctaaagatgttagggataatgtaataactagactaagggagttgtctaaaatttattcattataatatgatgctagattaaagattttattaaatatataatatcttgcatttagtatataatatctcactgagtttaattatattaaaaatatgacataaaggtgtcgtatattataaattataattgaattagttcaaaataaaatatattaataaaaacaaagtgaggtataaagtatgaattatgaaatagtagagataaatgagaaaatagttataggaatatcgaaggagactacaaataaagatggacaagcggtaaatgctataggtgaattgtggaaaaaatttatgggcaaagggatatataatgctataaagggtaaaaagaatgacaagacaataggtctatatacagattaccagggtgattttacaagtccgtatagctttgttgcatgttgtgaagtaaatagtaattctgataaagagaagaatttagaagaattaaacactaataatactgttggagaaagtattattagtaaagttatactagcaggtaagtatgcaaagtttgttatagtaggaggtcaaaaagaagtaggagatttttggtttaagttttggcaaatggattttgataggacttatataagtgattttgaagagtatcaatgtaatacttttgatacaaagaaacaagaaattcatatttacataggaataaagtagatttgttattactatattgaatgaagtattgagtatagtacatttattatagatagttttactatttataactataagcagtaaatctgtaaaagatttactgcttttttagtaattaatagtatcagtatcactttgaatcttcagacatattcgtcatttaatattgtttattgataaatgatacttgtaaatataatgatttgttatttaatttaaaatatgaaaaaaagtattataaacacattagaatacttctggatttatgagtatacaatttgaaaaatataaaaaataatgtataaagctaaatctaatttaatcgataatacatatagagaaatataattaagtaaataaacaactatctattagatattgagaaagtcaaatcctatatgaatctacagaaatgattttaatgaatctgaaaaaattttttatacaaacataaaaaaggtataaagttgttttattataatttgattacttttgataactttttatgttttatacaattatatttttaataactcgtcaaaacgccaaacatatattacaatagatatataagtttttttgttgacaaattatgttaagagaattaagtataatatggcataaataattacttttatttatcaatgaaatgtatttattgtgtagcgaaaaatagtcagatagtatagacaataactgaagataaaagcgtttattgttgtacatatggaggagttagttttatggaaaataaaattttgatagtagatgatgctatttttatgagaatgataattaaagaagctctgagtaaaagtggctataataatttaatagaagcaaatgatggagaagaagcgtgtaatatatttaaatatgaaaagcctgatttgatgttgcttgatattacaatgccaaaaaaagatggtttagaggtgctaagagaaataaaaaagttggattcaagtgctaaggttgtaatgtgctctgcaataggacaagagaatatgattgtagaagccataaaacttggagcgttagattttatagtgaagcccttcaaaacagaaacattagttaaagttgtaaataatgttttaaaataaaagtgtaaatatacactgatacaatgaaaagcaaataaatgcaataataaaagggaggggtttatattataaattatttagaacttgatgatgttcatatagatgctcttagagaaattggtaatataggctctgggaatgcaattactgcacttgcatccatgataaatagcaatgtagaagtattaatacctatggtcaagatacttgaatataatgaagcgacaaatttgcttggtggtccagaaaacaaagtagtatgtattttactcgatatgaaaggtgatatcaatggaatgtttatgtttttgttggatgaatcaataactcaacttatgctaagttctctttttaataaagaagaagcttttttagatgagattgaggcaattgaaatttcagcaattaaggaaataggaaatattatggcaagttcatatgtaaatgctattgcatctatgttaaacatgactataagtgtttcaattccagatatatgtattgatatggttggagctgttctaaatgtgcctatgataagattttcagatgttggtgacaaagtcttatttatagaaaataaatttaaaatgagtgataattattttactagccacattttgatgattccagaaatgagctcacttagagaaatactcgtgaggttgggattagaagtatgaatagagagatagtagtgaacattgcagatatgaagatagcctatagaccaaatgttttagttacttatgcacttggctcttgtgtaggagtatgtttgatagataaagtagctggaattggtggaatgttacacgttatgttgccatatagtaaagatgctattaacattgaaaataagtgtaaatttgctgacacaggaataaatgagctcattaaatctatggagaatataggtgcaaatagaatatatataaaagcaaaaattgctggaggtgctcagatgtttttaggaagcagcaattcagtaattgcaagtataggacataggaatgttgaggcagtaaaaaaaactcttttaggattaaatattccaatattagctgaggacacaggtatgaattatggtagaacaatacgtttttacactgagacgggtgaattacttgtagattcaataaataaaggtaagaagaaattataatatatatttcatagaaagtgtattttaggagggaggtattaaatgagatttccagatgacccatatttagattatggactaattgatgaaggaattaagtatctaaagtttaaagtagatgagcaagattttggggttgaacttgaaaaggtaatagaaattactggaaatcaagaaattatatttattccagaactacctacatattctaaaggcataataaatctaagaggaaaaatcattccaataatagatatgcgtttgagacttaaaaaagatgaattaatgactacaaattgcatgtatatagtagtaactgaaataaaggacttggtagttggatttgtggttgatagagttgatgatatagtaagcttagaaaaaagtaaaatatcacctccaccaagagttactatagaatattcggattattttgtaagtggcgttggagaattagaaggtaaaataattactttactagatttagagaaacttttgacagataaagatgaagttttaatagatgaattaatcaatgggtttgattgcactatcatgtaacatagggatgtagttggagtgttattataaaaagattgtgatgagaacatttaagaatatagtggtataattattaagtataaaaattttaaatcattaaaatttgaatatattatgtttaagagaggtttgtatatgaaaaataagcaacagggaacaattttagtcgttgatgatagtgttctgatgtgtgacttaatagataaaacacttacaaaagataattttaaggttaaaaaagcatttaatgcaatagaggcaaaagaatttattgaagaatttataccagacattattttgcttgatataattttaccagataactctggttttgagttttgtaaggaagtaaaatctaatactcgtacagcagatatacctataatttttataacttcaaaaaatacagatacagacatagtaaaaggatttggtgtaggagcaattgactatatggtgaaaccttttagtatgacagaattaaaagctcgtgttatagctcatcttgaagtaaagaaatctcaagataaattaaaaaagataaataatgaactggaatcttctcttgaaaaattgaatagactcgttgtaagagattatcttacaggtctttacaataggcgacatataattaatcagcttatggagcaaagaagaattaataaatatagtgaaacatcaatatcccttatccttggtgatattgatgactttaaggttatcaatgatacttatgggcatgaagcaggggatttcgtgttaacagtaatatcaagtataataaaaaagaattgtagacaaattgatactgtatcaagatggggtggagaagagtttttgataatgctcacaaatactccaatagaaggtgctaagatactttcagaaagaatccgtaaagagataaaggagtttgatttcaactataaagaacataaaataaagtgcactattacattaggagtagtagaagtaaactcaaatatatcattagaagaaaacatatccttagcagataaagcaatgtatgagggtaaaaacttaggaaaagattgtagcgtagtgagtacaatgaaaggattaaaaaagatataaacttactttatgaaggagtacagatatgaaaagagaagtaaagctttctaaattagcaattgtattgctgattattatagtattggctgttctagcagggattttttcttctatttcatcttataaagcatttgaaaaagtagaaaaaagtattaatgatatgaataatttgaggactcaaagtcagtatataaaagatacaactagagagataagtgatgtattaagaagatatgtatttacaggagaaaaaaagaataaagatatttatgaaaaagaattatacggaaaaacaagagaatcagctttaaacaaattagaaaaaattggtcttacaaagagcgagtcaaataaaatcttagaagcaaaagaaatatcagattctttagtaccaacagaacaaagtgcaataaaggcagtcgaaagtaatgataagagtaaagctcaaagtataatttttggtagtgactatataaactcccaagagaaaatggattctttaataaatgaatttcaagaggatatagttacccgttcaaattccaaaattgtagaagtaaaaaaagaattacaaagtctaatattaagaacaatatttatactttcccttttaataatattgacaataatagaatatacagtaataaaattaaagatagtgattcctattaatagagtagaaaaacacttttcaagaattgcatctggggacttaagaacaagtatagacgttgaagaaagtaaatctgaaataggactattagtgagttctgtcaaaaagatgcaaagtatgcttttaaattacatagaccttatagacagtacattaactagtattgcaaaaggagatttaagagtagagatagaccaagaatttataggtgattttaaatcaattaaaatatctttagaaagtataataaactcttttaatggtgatttttctgaaataaatttatcagcagaacaagttgcaagtgcttcagaacaagttgcagcaggtgcacaagctctttcacagggtgctactgaacaagctagttcagtagaagaattagcttccacgattaatgagatatcagatggaattaagaagtgtgcagatagtgctagtcttgcatgtgaggtatctgaccaatctgcatcacaagttggttttggaagtagatgtatggatgatatgatgacatcaatgggtgaaataagtgaaaaatcgagtgaaatatcaaaaataatcaaaacaatagatgagatagcattccaaactaatattctcgcattaaatgcagctgttgaagcagcaagagcaggtcaatatggtagaggatttgcagttgtagcagatgaagttaggtctttggctggtaaaagtgcaaaagcagctcaaaatacagctattctcatagaagaagctattaaaacagtagaaaatggtgtcagaattgctaaagagactgcaaatgcattggacttggtagtaaatggtgtagaaaaaactactaattatattaatggtatttcttcggctgtacatagtcaagaagtagcaattacacagattttatctggaatagagcaaatttccatagtagtccaaatgaactcagcaacagcagaggaaagtgcagcagcctcagaagagatgtctgctcaagctcaaattttaaaagaattagtagaaaaatttcatctaaaggaaagtgaagtaagagaatcatcatgggtttaaattatgaggtgaatattgaagtaagagaattatcatgtatttaaattatgaggtgaatattgaagtaagagaattatcatgtatttaaattatgagatgtatatatattgaaataagagaatgattgtgtatttaaattatgaggtacatatagtgagataagagaatcatcaaggatttaaattatgagatgcatatataatagaaaattatttgtaggtcgtaggtgataaatgtgaattatattgaaccgagtatgagacaaatgttagatatgtttatatttgagacaagtttattactcgaacaattagatgaaattatgattcaaatagaaaaagagaaagtatttactcataacaacattaatgaaacttttagaataatgcatacgataaaaggttcagcatctatgatggggttagacaatatatctgctttagcacatagtgtagaagacttgttttatgctatacgtgaaggtaaaatagaagttttagacaatgacctattatttgatttagtctttcaatcattagattttataagaagagatatagatgagctacaatcaagaggttgtatatcttctgattactctaattttattgaaggaattgaagagtatgtgagtactttggaattatcaagttctatgaaatcaaaggataatgcaaatttagaaagtacagacgaaaaagaagcaatcgattcaaattttgaatacaaagaagactctgatgtagtaaaaataatctttgaacaaggttgcatgatggaaaatgtgagagcgttcatgcttgtatttgaacttagagattactgtgaatttatagatttttatccaaaagatgtagaaacaaatgcagagtctacagaatatattaaaagttatgggttttatatacaatttgtagctaaagaggataaggcaatagtttataaaactatagaagataatctctatgtaaaagaatacataaatattagtaaaaaagaaatagaaatgaaaaatacatcaaataatgatgcagtagaaaataaattaaaagataataataaagtaagtaaaagttatcaaaataactatacagaagatgagatacaagaagatgttttaaatgaaaaaactgatatggaaaaagatagtctaagtgaagaaaatgaacatttaccaataagtaagcagagtattatgagtgtaaatttagaaaaattggatttacttcaaaatatagttggagaaattgtaattatggaatcaatggttgtaaatagcgtaaattctacaggtgttgatatagataatttcaataaggcaacaagacaattacacaagcttacagatgaattgcaagatatagtaatgtctatgcgtatgattcaaattgctggtgtatttcaaaaaatgcatagaattgtacgagatatgaataaaaaattagataaaaatgtagagttaataactataggagcagagacagaggtagataagaatgtaattgataatttagcagaaccttttatgcaccttataagaaatgctatggaccatgcaatagagcctattgaggagcgtatagcgaaaggtaaagaagaagtgggaaagatagttttatctgctgagaatctaggcggagaagctgtgataagtatttcagatgatggtagaggcattatgagagataagattttggcaaaagctaaggaacaaggtcttcttaaacatcaaattaatgagtatactgatgacgaggtcaattctttgattatgactccaggtttttctacaaaagaatctataactgaattttctggaagaggagtaggcatggacattgttcgtaaaagtattgaaaaagttggaggttcaattgaagtaaaaagtaaacaggatgaagggacaacctttactataaaaataccattaactctttctatagtagagggtatgaagtttaaagttggagattcactatttactttaccaatatcatccataagaagaacatttaaacttacagacttaaatcaaataattacagaaggaaataagacagagttaattacaatatatggagcatgtattcccattataaggttacataaaatatataatattcaaacaaaagtaaccaatctgatgcatggtaatatgataattattgaaaatgagcataaagcagtatgcatttttgttgatgaaataataggtaatcagcaagttgttgtgaaaccatttccagtttatttcaaccgatttaatataaaaaataagggtttatcgggatgtacaatacttggggatggaagtataagtttaattatagatgcagatagcattatagaaatatattaggggatttaaagtatggctaaagatgaaattattaaacaagtattaacattttatgtaaatgatgttatttatggaatagaattagaaaatgtgattgaaaccataagatttcaatcaataacgtatgtaccatgtcttccaacatatataagtggagttattaatttgagaggaagaataataccagttattaatatgcatataaagtacaatcttcctaaagctgattataatgagagaacttgtataataattacaaaggttgatgagtatcaagttggaattattgtagataaagttgttgatgttattcatatagaaaatctaaatttactagagacgactaattctaacaacactaatattaataaagatataaaagagattgcgaaagttgaagataattctatattaattttagatattcgaaagtttttgattaatagcatatagttagttctgataaattagcaggaggaagtttttgcatgataaaactcacagatgaagaatttatagttcttgtaaaccatgtaaaaaaagaatatggtattgatttaagtaaaaaaagagcgttaattgaaggtcgcttatacaatacaatgatagagaaaaaacttagttcttttagtcaatatatgaatctattatttaaagataagacaggaaatgaagctataaacctaataaatagattgagtactaaccacacattttttatgagagaacctcaacattttgagtttatacagaatagtatacttcctttttgggaagaaaataataaaataagaaacataaatatatggagtgcaggatgttctagtggagaagaagcgtattcaatagctatgactttggatgattattttggatataataaagagttgtggaacattaaaatcatagccacagatatttcaactaactcacttgaaaaagctaaaagaggtatatacatagaatcaaatgttaacaatgttcctgagttatggaagaagaagtattttatagacaacaaggatggtacatttaaaatttgtgataagattagaaaaagtgtaatttttaagtcatttaatttaatgaatgatttctcatatcaacattttgatttgattttttgtagaaatgttatgatttattttgatttaaaaacaagagaagaacttataaataaattttataatgctaccaaaaaagatagttttttgtttgtaggacatgcagaagtaatcaacagaagtagtactaaatacaaatatgtaaaacctgctatatataaacgataaaaaggtatttttgatatatgattttttggaggcggtaatgtggaacgttttaataatatggttattgctataggcgcatctgtaggtggtacagaagcaatacttgaaattataaaagacctaccaaaatcaacaccagggattgttgtagttcaacatatgccagctatatttacttatatgtatgcacaacggcttgacaagcagtgtattatgaatgtaagagaagctaagaataatgatagagtcgaacaaggaaatgtgttaattgcacctgggggttaccagatgaaattgtgtacggataaacaaggatattatgtaacttgtgaaaaaggagaaagaataagtggtcactgtccatcagtagacgttttgtttgattcagtagcagaagtagcaggtaaaaattcaataggaataatacttacaggtatgggttatgatggagcaaatggacttttaaaaatgaaagaaaatggtttatttacaattggacaggatgaaaattcttgtatagtatatggaatgccaatggtagcttttgatagaggttctgttatgttacaattacctcttggtgaaatttcaaactgtttgataagacatattaatattttaaaacaaaaagattaattttttataaataaaaattaatcttttattaaattatatggataaaaaaccctagaaactccaaatataataagagagatttatatttaggaggaaaatgataatatgaaattttttaaagtcgatacaaaagctaaagttttaagatatgtatttgttttaacattgactataatggctgttttggcaattaaacatgactataaatataataatttaaggaaagatgcttcaattaatttaaatagtaataaggaagcagtgactgttatgagtaaccagtcattaccaaagggtaatacaaatagtaaacaaactttatcagtaagtacaataggaagtaaaacaatagtgaaaaatgatgagtatttagaaagtactataaacatgcctgtaataacaaattcaaataaaattgttgaaaggtctacaaatgataagataaaaaatgacatatttgaattttataataaatcatataaagaagcaaagcagtatcttaaggataatcctgacgagaaaaataagtttgttgcaaatgtagactttgaacttaaaaagaatactgattctgctcttagtataaaagtgagatattatacttatagtggtggagcacatggattttatcaagatatagcatataatgtggatatgagaactggaaaatttttagaattaatggacttatttaaggataatactaaatataaagaagttatagatgaagaaattaaaagacaaatagctgaacttgaaaaaaaggatgaagaaaatatcggaatatataattttaaaggtataaaagagaatcaaaacttttacttgcaagatgagaatctagttgtatattttgatttatatgatataactccatatgcagcgggaataccagaattttcaataaataaagcgttgataagttctatgctaaaaccagagtatgtagatttatttgatttgaaatagaagattaaattaaatgttatgctataatatttagcatagaaacttattaaaattgggggtataaaaatgctacttttaaaaaaagacgacataaaaaaagtatttacaatgagagatgcaattgaagctgataaggaagcttttagaatttattgtgaaggaaagagtgtaaatcctttgagaaccaatatatctgttccaagtcaagatgctagtatgttatttatgccaggatacgtagaagaattaggctgtgggggaataaaaattgtatctgtatttcctaaaaatgctcaaaaaggcaaaccagtaattccagcaacagtactattattagatggagaaactggagaagttagtgcagtattggatggtacttatgtaactcagattcgtactggagcagcctctggagcagctatagatgtattggctaaaaaagattctaagattggagctttgataggtctaggaggacaaggtgagccacaacttgaagccatgatagaagctagaaatttggatgaggtaagagtttttagtagaaacagggaaagtagagaaaaatttgcagaagaaatgaacttaaaattaagtaaatataatactaaaatagttgcagttgaatcatctgatgaagccatagataacgcagatgtgatagttttagctactccatcaaaacaaccagtacttaatggaaacttagtgaaaaaaggagctttaataagtgcagtaggttcatatatgccagatatgcaagagttgtgcccaaactgtttaactagagcgtctaagatattttttgaatcaacagatgcagttttatctgagtcaggagatatattaattccattaaaagaaggtaagataagtaaagatgattttagtggtgatttaggaaacgttataaatggaactattcctggaagagaagatgatgatgagataattgtatttaaaactgttgggataggtgtacaagatgtcgtaacagcaaaaagaatatacgataaagcaaaagaaaacggtattggaatagactggaagtggtaaaatattcaaaataattctatagttagacaaatttatgttataatgttgataaataaattttttattattttaattgagggaggatgtttgtatgaaaatggtaaaaaagttaatattgtctacgattatggctctagttttagttctaactatagggtgttctaatgcagaagaaaaagtaaagtcgaattttgaagctaatttagctgcattagaaatgtataagtatgatgaaaaaggaatttctgatgcattaacagaagctgaatataaacagattcaaacttataacagcaaggacaaggtttcaatgattgctcaattgacacctctttatggtaaagaaaatgctgaaaagatatacgaaacaattgttaaattaattcaaggtgttgaaaagacagtaacagtggaatcttctagtaaggataagataactttgaaagttgtaagtaaagctttagatactagtaaagtaatgagtgaagcgaacactttagtaaaatcttatgtaactgatgaaaagaattacgataaaaaagaaaaagaagttcaagatgatatgacaaaaatgattatagacctttacaataagaaaccaactaaggaagttacaactatgattacatatactaaaaaagatggtaaatggcaaccacctagtaatatacaaaagttatgtgaaggaatatatacaatttaatttattttaaagacacaaaactatcttttaagcatataataaaatgtttggaagatagtttattttattttcaaagtataaattatattttataaatgatttattttataaataatttatcttgataaatagtaaataatttactttactaataataaataatttatcttaccaattaatttactgtattaagtaatttttttattaaataatttgtttactaaataaagtacaattaatagaaattattttattacttgttgaataattaatcaaatttatttgatgtatttggtaatgttgactatataaaactagtaatacaattatggcatatcttgataaaacatggtgaataattgtatcttatatagtcgaaaatatgatatattaatattatacgttaaaagattatttatatttttaaaagtttttttataaaatgaaaggggtgttttttatggtatcaaggcaagaattaaaacgagtatctaaagctcagttatctggaaactggggaatatgtgcaatttctatggcagtatatattgcattgatagtattaatatcaattgtaggattaccttttgaaccattgactactattgtagtggctgtaatagctttttgcgtttcagcaggatttacatgtatgttcttgaaaattactaaagatgaaaaagtcaagataggagatatctttgtaagtgggagaatttatttaagaagttttggtttttatttatttgaatcaattattgtttatatttattcttttataatcacaattataggagcgtttttatcatttggagttttacttactagtggagcaattgaatatttatcaagtgataatgttggaatagggactattatttctactggaataactctagttcttataatacttgttcttatgttaccggtttatatattgctattatatgtttctcaagctactttcttaatttgtgaagacaaggataatatgggtgtatttaaatcaatgggtgctagtttagatatgatgaaaggaaatgtacttaaattatttgtactaaactttagttttataggatggtatatactttcaatagctactcttggaataggtctactatggctaattccatatgtaggtgttactaattgtaatttttatagacaattagtaaaagaaaacccagatgtagaggatatactattagataaagaaaaatcttatactatgtactaagatagatagttatacatttaaataaaatatggctttaattaaacattaaagtataacattgataaaactgtcttttataagaattttttaaaaagacagtttttattattaaaaaataaatgattgacatagtatagactactatgatagttttttattatagtaatgactattgtgataactatatttgaggagcgattttatatggagataaaattatttgattcagaacttaaagtaatggaagttctatgggagagaggagaaagcaaggctggagagttagtaaaaattttaaaagaagaaacaggatggaatagaaacactacgtataccgttataaaaaaattagtgtcaaaaggtgcaatagagagaattgagccaaattttgtttgtaaagctttaataagcaaagaggaagtacaaaaacaggaaacagaaactttaattaataaaatgtttggagggtcttcagaaaaatttctttcagcttttattaataaagaaaatctttcaagtgatgagattacaaaactcaaacaaattgttgaaaaattaaagtgaggtaagatttatgttcattaaattgttagaaatgagttttacttctggagtattacttttaatagttatttttataagagcatgtttatttaaaaaattacctaaaaaggtatttgtattattgtggttgattgttttatttaaacttctaataccagtaagtttaaattctggttttagtatttatagtataattgaatcgacttttgatgtagaattgggtaatacatcaacagaaaattatactcttaagaaagctagtgactctacaggtaaaaacaattctgacgaatttgaaataatgtctaatattgaaaatattatgatgttggaaatgttgggcattttgtcttttatagttactattatgtttagcatacttttatgctttagatattttaaaataattaatctttttaaaacttcaattcatataaaaaatcatgagttcattaaaaaatggatgtgtaagaatagccgttttagaagatttattgtttgcatatctgaatttactaggacaccacttacatctggtattttaaaaccacgaattattttgccaaagcaaatgaattatgctaataatcaaactttagactttgttttaactcatgaaatggttcatattaatagctttgataatctgttaaagttatttatgcttgtagctcttgttgtccattggtttaatcccttagtttgggtgatgttttttttactaaataaagacatagaatttagttgtgatgaaaaggttatgagtatacttggtgaagaatatagggctgattatgcaaccacactaataagtctagcagaggagaataatccattttcaatgacaatatgtagtggatttggaaagacaaaaatagaaaagagaatagttaatattatgaaatttaaaaaatcaacttatgttacttttttagtttcaactgtattagtttgtgggacaggtcttgtttttgcaacagaaaataaagagattaatgaggttgaatcttttggtttaacaaaaaatgaacaaagtgataaaagtggattttcaataagtagtaaatcaactgatttatattctcccaaagtagaatctgatattcttgttagtaaagctaaaagtgatggagagactcattttagtacggcaaaagtatctgtaattgaatttagagagcatgaagaatcatctatgagcaaagtaactaattctgagaatagtgaagaaacgtatgtaaataaatctagtaatagtaaggatgtactttatactgattcaggagaagtttcaattgagcaaagtaactataatgataatcgctttgtcatatcaagaaaagggaatttgttagcagttaataaagaacaatatagaacatggatagagtaaccataaatcttagtaatataaaagatttagaattaaaatactatctcaaaataattaattttgttttgagatagtattttttattgaaaagttttttaaaaagacttgacacaaatatgactactatggtagtctaaagatgtggttgataactattgcaatagtcattttaaactacactacccaaataaatctctaagaaaggaagattggttatgaaaataaaaaaatcccttataagtgcaatgatggtatctgcaatggtactaggaggaactggagcagtatttgcaaatggaaatgattcatctaatattgctttacctaaacttgaatctctaataaaatcaggaataactgaccctactgaattggaaaagtatggtgttgagcattatacttatgaagagtatgctaaacatattcaagaattaaaagactatgctaaagaccctaatgcagtcaaagatgtaagtcaaaaagaccttgaggaaacaattaagaaaatggaacaagaattagaaaagataaaaactgaaggattaaaaattatgaagcctatcactatagaaaatgaagatgggtctcaaatttcaattgcttacaattatgcagcaattgactaatgttaaatataatctctaagatatttcaaaatcctaagtaagtatgattaaatacattaagctactgtaatgatataaacatgcagttgatgattatttaaataattatcaactgcactacccaaataacacttaagcttgttaaaattatgtaataaaagtatcaaagaatttagacaaatgtaattgaacatatggagtgagaataaaataaataagactcaaataagtaataaaaaaataaagtctaagttaaaaataaagtaagaagtagaataaaagtaaatcgagtcaaagtaaaagtattaaaccaaatttataatgttaacattttttaatgtatgttaagaaatgttaacattatttttttttcttaaaaataataattgaaacattctgaaaaatataacgaaaattaaatattatctattagattcattaaaagttaaagaaaattagcattttaggatttttaagatttgtttaaaaaaatcaaaatttattggcatagtaattgcttaatacatagagtaataatatgattataaatttattgattaattttattattatttttaaggggggagagtatttgtagttataaagcatattgggaataatgaaaaaggttaaaaacatattactataaagtatagggggtaggttaaaagagtaatcataaaataaatatacggataatagtagataagaataccagaaaaaaatagatagttaaagggttagggtgaaagagtaatcgtaaaataaatatatagataatggtagataagaatatcagaaaaaatagataattaaagggttagggtgaaagagtaatcgtaaaataaatatatagataatggtagataagaatatcagaaaaaatagataattaaagggttagggtgaaagagtaatcgtaaaataaatatatggatgatggtagataagaatatcagaaaaaaatagataattaaagggttagggtgaaagagtaatcgtaaaataaatatatagataatggtggatagagtagtaagaaaataaatagataaagggatagaataaatttaaatatggaaaatgaatatctaataataagtgattaataaataattgtagatagattgtaaattaaataaatctttaatagaaaggagaactatttatatattaaatagtatttataaatatgaaaaaaggcgattttatatggagtggagttcttatttgtattattgctgtcttagcaataccaagtagtagagaagtatttatggaagcaacaggtgcacatccatatattgggggttttttaaagtttgctgtattagctacaatgggagatttacttggtgctagaattttgtataaggattggaaaataccagtaggagtattttatagagcaatagtttggggaataataggtgtagttaccacatatggaatgtcaatctactcatcaggtgtaggtcaagcacaagtggatggtatgcttccatttgagggaatagcttttgcaaatgctctatttaagagtgcaactatgaatatactaatgtcaccaactgtatttttattccataaggttatggactgttttatagataaaaaatatgaggttggaaaggggattaaggtaaaacttaaagatgtggtaaatattgtggactggaatgcttaccttggttttagtgttttaaaaactataccatttttctggataccatgtcatacaattgtattcttattccctgctgagtatagagtaattgcttctgcatttgcatctatagctttaggtctaatattggctttagctaataagtctaaagttgcagtttaggttcactgatgaagataatagtattatttaaattatgaataactttttaaattaatattatttatatttataataaataataatttagataagaaggaatattctaagtgatagatagtgttttaaataataaggagtaatattctaagtgagaagtagcattttaaataataagtgagattttaaataaaaagtaagcttttcgttagaatagcattttattaaacttaaaaataaatataatattttaaagaaatctaagttgctaagcactgtttttaagaagcttaaaatcccccatttaaagttttaagattctaaaaaaacaagttataactaaaaaatggctgttaagactacaatacttataagtaaaaatacttatggtatatattagttcataacagccatttttattttaaattaataattttattcaataatttgagtttatgttctaaatcaagctttaaattaaaggatttaaagaagctattctagttgtagctacataaactctggatatttcataccatgttttaaaatctactactccgctttgaggtaaaccaaagattccttggaatatcttaacagcgttttctgtatctgctccatagataccatcttctataacttttggtacagctggataagaattagatatagcatttaactgattttgtatggttctaacatactgcccagaagaaccaacttgtagtgtagtaccagggaatgacactggtacaccacttactataggtgctctttcaaatactatctcatctccatagaaatatcttaggatactctcatagtcatatccttggtcacctaagtctttactgccccattgagtcatttggtcaggacattgagatttttgtccatcacaatattgtgctaatagtggctgtcttgatgtaggaggtctttttataaaagtattaaaaatagcatctacaactacgttaattggttcaaataagtttctattatttataaacttatggtcgtatgctgttgttgaagttattgtaaagttatatcctttatttctataccattcagtaaagactctatttaaagtaaatgatattatagctattacatttgcatagattgtctgttcaggccaagttgaatatatttcagatgacgctatgtttttaatgtactctttaaatggaatccaatagtttggagctgatgaatcttctggcaaaccatcatgaactactataaattcaggcactacagggttatctaatacaacgaaaccagtaggaggtggtaatggttttaagttactttctggaatcttaggaggataagtaccatatagagtatgttctcctatgtcaaaaatcaactcactttgtcttgagaaagaacgcttacttcttgttctaggagacatgggaactccttgtcttgctacaattgtagctaacaactgcgttccttctatgacaactgtctcatatccatctgctatggcttccactatatactggctataaggtctaacatcagatggctgtagagagtaatctacatctggtgctggtaatactaaaccagtcacttgaccagattcattacttcttaggttttggtataaagttgatgagctttggctaccattagacattgaatatatgtttactactgcattttgaataggtctattgttagtagcatcaattatgcttactgttaagaaaccatcttgcatcaaatcaccctttctttaaatgaatttagttcccttatatttcaagatatgaatatagcttgaaatttgttaaataatatagatataaatttaaatttttttgagtatttgagtatatttgtatttaaataatttaaaataatttaatgtatattttagtatgtatttaaaacacaaataagctaaaaataagtagatgatataaatcataaataaatcaaaaattttgaaaggaaaataatctatgaagctagatttatttttattagcaatagttcctatattgatagggatgttttggataaggtctaaagatagatattgtagagaacccctaatccatctaattaaattttttttaataggtgcttttctaagtgttataattatacttttagaaaatttactgatgaagtttaatgtatttgaagggtattcagaactaatatatgtatcatttgtagttgcaggacttgtggaagaaggtgtaaaagctctgatactgattcctgccctaattaaagaaaaacactttactgaaaagttagatggtattatttactctgtatttttagctttaggatttgcaacaattgaaaatatggtttatattttttctgaaagtagaaatctagcactgcaagttggtattaatagggcagttatctctataccagctcatgtaatgtttgcaattactatgggctactatatttctaagtataaatttgagggaaataaaaataaaagacgtgagtatttgtttatggcagtgttaattccaattttattacatggagtttttgatttcatattgatgatagaatatagatgggctattatattacttatagtttatgtaataattttgtggaagataaatcttgataaacttgagaaatatatgaatcactctaaaaaagtgtttttcggtaatcttaggaaaaagaagaagaaataaaatttaaaggaaagacataaataattaaagtataataaatgacacacaagtaaagcagattgaagggggattatagatttgacagaattaccaaaggaatttttagaagatattgaagaaatactaaaagatgaatatgatgattttataaaaagttatgaggaaagtaagactactgggcttagaataaatactttaaaaattgacaagaaaaaattatttgatttggagttgtttgatttgaatcaaataccatgggcagaagaaggtttttattatgatgataaaattgacagacctggtagaaatccactgcatgaggctggagcatactatttgcaagagccttctgcaatgagtgtaataccaaaggcagatattaaagagggtgaaaaagttctcgatatgtgtgctgctcctggtggaaaatctacatatatactatctaagctaaacgatacaggtttattggtttctaatgaaattaatgctagtagaattaaggctctaggggaaaatttagagcgatttggagcgagaaattgtattataacaaacaccgattctaatagcttaagaaagacgtttaatgggtattttgataaggttattatagatgcaccttgttctgggcaaggtatgtttaggaaggatgaggttgccatatcagattggagttatgcaaaggtagtagaatgtcaatccatccaaaaagagattatcagagatggatataaaatgttaaagaaggatggcattttaatttactcaacttgtactttttcaagggaggaaaatgagcatgttataaatgagtttatcagtgaatatccacatgcagaacttattgaaatggaaagattatggcctcataagataaagggagaaggtcattttgttgccaaaataaaaaaattagaagaagaagaatgtaatgtcaaagaattaaaaataaaaaatttagataaagaaataaaggattatagggagtttgaaaagaaatttttaaaggttgatttttatagtaataaaaaaaataaattttatttaagaggagaaaatttgtacctacttcctgaaatatatccagatacgaaaaaactaaaagtattgagatacggtttgcatttaggggttttaaagaagaatagatttgagccttctcatgcactatctcattacttaaaagttgaagatgtaaaaaatgttgaaaacttcagtgtacagagtgaatcaattcttaaatatttaaaaggggatgttgtgaattctaatgatagtagaggatgggttttggtttcggttgaaggaatacctttaggttggggaaaagaatcttctggtgtaattaagaatcattatcctaaaggtcttagaaaagtattttaaactattagaaaaaagaagtataatatttatattgtaggtttatggtagattattttgctgtagattgacttaatatttaacacagaggagacgattttagtgggtgaagcagttaaaaaagaagttgtagaatggataaaagtgattgtcatagctcttgttttggcatttgcaataactcgttttatagtgccaacaatagtcaaaggagaatcaatgtatcctacattagttgaacgtgattatttgatagttaacagaattgcgtacaaggtaggagagccaaaatacaaagatataatagtatttaaaaccgacttaacagaggaaaatggaaagaaaaaagatttagtaaaaagagttatcggggttcctggtgaccatgtaaaaatacaagactccaaggtatatgtaaatgataagttgttagatgagacttcctatatacataataatcgtactgatggagatattgatatcgtagttccagaaggaaaattatttgcaatgggagataatagagaaaaaagtttagatagtagatacgatgaggttggattggtcgacgagcataccattttaggaaaggttctagtcagattgtatccattttctaagataggaactattgactaaacatataaaatttggagcaatcgctgattagctgaaatcaccagaccatacacaatagttgtctatataaaaaagacaacaccttatttagtagacttatctaaaagatagtgtttaagagacattatcaataaagataatataactataaaggagaatttgtgaatgaatgaaactattaaagaagagattgtagagtggataaaaataattattactgcacttttttttgcatttattataactcgttttataaaaccaacactagtaaatggagaatcaatgtacccgacacttaaatcacatgattatttggtagcaaataggatgacatataagttatcagaaccaaaatgtggagatataatgatatttaagactgatttattacaagagaatggaaggaaaaaagagcttgtaaaaagggttataggtgttcctggtgaccatctaaaaattaaggattctaaggtttatataaatggtaagttattaaatgaagtttcatatatacatgataattatactgaaggcgatattgatatggtgattcctaagggaaaagtatttgcgatgggagacaatagagaagttagtttagacagtagatataaagaagtgggattggtagatgaagaaaatattaaaggaaaagttattttaagagtatttccttttacagatataggtatttttgagtaggtgatttgtatggcagttggtatagcgtccttattgtttaatattgaggaggctttaaacatttgtgagagtataaagcaaataactcatttagagattggaattgacaatatatctgaatgtagcgagttatgtaaatataaagagagaatttctaagttaggattatctatagggatacacttgcctatggaattaaatacttgcgaaaacatagagtatatacgaaattcatggataaattttattgagaagatagaatttgaactaaaaggatttgatataaggtattttaaccttcatttgggatatgttatgacaaatagagttagaaagaatagagacaaatatttaggaaatagtgtggattttttagataaattaaatacaaattcatatgtatgtatagagaatacttattcaaaaggtggggatttttcaaatattggaaatatatcttatgattttgaatatatatttaagaggattaaaaattctaagatttgtttttgttacgatactggacactgtttaattgatgaggatgcttatgtaaagaacttaaaggataaaataagactgatacacttaagtgataatgatggtatcaatgatacacatgttggtataggaagaggaattttatctgaagaggggattaaagaggtcttaacattagatgcagaatatttagtattagaaataaattacgaagacattgaagatactataagtaaattgaataatattgtaagagagggttaaatacctctctttatcttgttgatatgcctcattaactaaaatttatattcatcaaaaggaaggagatgttgaagtgaaaaaaataaacttaaaaatagaaggaaaagataaggaatattcattagaagaaaattcccctggaatcagattgggagatatagcgaaagaattttgtgatgagcataagggttatataacacttgcagttgtagacaataaactaaaagagctaaattgtagagttaagaaggattgtgagataaattttttagacactactaatgaagatggagagagagtttactttagagtcatgtcatttatatttgtaatggcttgtagagaaatcttttgggatagcagagttacaatagaacattcactatcagatgggctatattgtgaagttcatatagatagaaagcttaaagaagcagatgttgaaaatataaaaaacaagatgaaagagatagtaaacaacgattatgttatagaaaaaattgaagttacaagaaatgaagctatttctatatttgaaaataatgaaatgtatgaaaaggcagagcttttgaaatacaaagagtatgatagtgctaaagtatataagtgtagaaactatatagaccatttttatggttatatgttgccatcaactggttatataaaatcatttgatattaagctttataatggaggcgttataattttagggcctagtgaagaagataagactcttcctatgaagtttgtacctcaacctaagctatcaagtgtatattatgaagcagaagaatggtcaagacttatgggaattgacaaggtagtatctcttaacaaaataatagaaaacaatgaatatggagatataataaggacattcgaagcattgcatgaaaagaagttatcccaaatagcggatatgataaaggatggcaataagagagtaattttaatagcagctccatcttcatctggaaaaacaagttttgctcacagattatcaatacatcttagagtaaataatttaaatcctatttcaatttctttagatgattattttatagatagaaaacatactcctttagatgaatatggaaattatgattttgaatcaatttatgcaatagatttagagaagtttaacttagacttaaagaaacttttagctggtgaagaaattgatgatataagattcaattttaaagaaggtaagagagaatacactggtaaaaaaataaagatagattcaaatcagccaattatattagaaggtatacatgggctaaatcctattttaacatcatctataccagatgaagataaatttaagatatacataagtgcccttactcaaataaatttggatgaccataatcgaatccctactgctgatttgagaatgataagaagaattgttagagactataattttagaggatatagtgctgataatactattttacaatgggcatcagttagaagaggagaaaagaagaatatattcccgtaccaagaggaggcagatgctatatttaactctgcttgtgtatatgaattagcagttttaaaacgatttgcgaaacctttgttggaagagataaaggaagataatcctgcacatattgaagctactagattactaaagtttttgcagtattttgttgaattggacgatacttctgacataccaggtatttcaattcttagggaatttattggaggaagtaaaatagttgattaatatgtgtattatagattgttttatgaagattaaatggcatagcaagtagtgtgattggtttatgttaagtatattaagtgtaaagtggagaattaaattgatacagattttaaagtttgagttgatatataaaaaggcttgttttatacttttgtatgaagcaagctttttattttaaattttacttttttgtttaatattttgttagtttatgtgataattttttaaaagagtaaaagagtaaaagagtaaaagagtaaaagagtaaaagagtaaaagagtaaaagagtaaaagagtaaaagagtaaaagagtaaaagagtaaaagagtaaaagagtaaaagagtaaaagatgttaggttagaaatttttgacgttataagaatttaaattactggattattagattactaaattactagattattaaattattaagctatttaaactgtttaaattgtttgaaaaatgaattgattcttgtagaaaatagttttaaagtataattttttttaacactgttttattatagtacaaacttgtgctaaaatagaatatataacataatataagaggtgcatatgaatacgttagatgagacattattaaaagaaattataagttctaataagaagtatactaattatgggcaagtcgctagttacataccagaattaaaaaacgctagaagaaatgatttaggaatttgtatcatagatagcgaaaataatctttatagtgctggaaactgtagcacaaagtttactatacaaagtatttcaaaaccaattgtgcttgctatggcacttatggataatgattgggaagacgttttttcaaacgttggaatggagccaagtggggacccatttaattcaataatgaaacttgaaattaatgacacaaaaaaaccctgtaatccaatgataaatgcaggggctatagtaactacttcccttataaatgggagttgtttagaagaaaaagaagaaagaatgcttagtttctttagaaagttagcaaaaaatgataatataggaataaactatgatgtctataagtctgaaaaaatgactggagatagaaacagagctatggcttacttattgaaaagtgatggatttatcagagggaatgtagaagatgttctagacctttattttaaacaatgctcaattgagatagattctgtagatttagcgagaattggaataaatcttgcaaattatggagtagatatagaaaatggtgagcatttaatgagtgaaatggtttctaggattgtcaagacatttatgatgacttgtggaatgtatgatgcttctggggaatttgctattaaagttggcattcctgcaaaatctggagttgggggtggtataatggcttctgtgccgggacgcatggggattggtgtttatggacctgcgcttgacaaaaaaggtaacagcgtcgcaggagttaaagttttagaggagttgtcaaataaactcaaattaaatattttttaaaatattaagaaaggatttttttgacaacaacatataatttaatatataattaaattgtaaagaaatatgaattaaataaattttttaggaggggtcaatgaaagaggtattggtattacgagatttggagtgcataaaggctattgcgcatccacgtagaatagatattctaaaagcatttgacaaatcgccattgtcagcaaaacaattatctcaattattggaagaacctcatgcaaaaataaactaccatataaaaatgttatacaaagttggtattttagaattagttgaggaaaaaataaagtcggggattgtggaaaagtactattatccaagtgcaaaaaatgtggttatagggaataggatacttaatttttctttagacaatggggaagaaaaagaagaattgtacatatcaaaatttgaaaatatgagtgaagttttttataaggcagcagaggaagatgttttagaaaatgaaaatatagttgattatcatgatatttctcttactcatgatgaattagttgaacttagtgacactatgaagtcaaagatagatgaaattttaaataaaagacaacacaatgttgaaggttctaagtatgatatagctatggttatagttcctactcttgaggaggaatgtcctagttagagaattaattatggattaattaaagatataatattagagattgaacatcaaaatttacttaataatcaaaaaatagtttttggtatgggtaaaacaatgatttttaatctctatttttttgttttcttatacctattgtatttgtaaataatatgtatagtgtaagatgtatacactatctgagaagtgcttagataatatacaaagtatgtaagattataatatttgaaattgattaaaatgggtataattaaagtgtaaatattaaaattaaaaattaatataaattaaatcaatgctagaaatatgttaaaagaggaatgagattagttgggatagaacatcccttagagcttatgaatttttagtgaaaaagtactatcaaataggaatctccatcttcatatgttggctaaatatagttaaggtggagtagttcaaaattaaaattgagtacaagtcgtagtacaaataaaaggagattaatatgattaaattaggaacacatctttcaatagcaaaaggatttgctaatgcggctgagacagctgtatatattggtgcaaatacatttcaattttttagtagaaatccaagaggaggaaatgctaaagaatttgatgaaaaagatataattaaatttcaagaaattagaaaagaaaataattttgcaccactgcttgcacatgcaccatatactatgaatctgggtggtacaaaggatgatgtatacgaatttgcaacaagggtgatagatgaggatataagaaggatggactcattaggaattgaatacatgtgttttcatcctggaagtcatataggtggtggtgtagattttggtatagatagaatagtaaaaggattgaacaatgccataaagggtgatgaaaatataactatacttcttgaaactatgtcgggaaagggaactgaaataggttttaaatttgagcaattaaaaagtataatagacaaaattgagcataaagaaaaaataggtgtgtgtcttgatacatgtcatattttttcagccggttatgatatagtgaatgatttagatggggttttggaagaatttgataaggttataggcatagaaagattgaaaactgtccatctaaatgatagtatgatgccatttggagacaaaaaagacagacatgctcctataggggaaggaaagataggattaaaagcattaattgattttatggaacatcctagtctaaaacatttaccatttttcttagaaactccttttgatgatgaaggtcacaagagagagcttaaaatgataaaagaaatactatctagtaaataaacctttattaaaaatatgtgaaatactccgccctcaacataattaaggtggagatacaatcatgaaatgtgataatttaaattaatggataggaataacaaaaattgtatacaaattaactgggtataaagtatgattatattatgaatagtatgtaaatatattgcaaagattctcataatttgttgtataattaaaggtaacatatttatattatataaaaaattattaaaagttaggtggggaaagatatgagaaatttaggcaatactaacatgaaaataaagagagttggctttgggggcattccaatacaaagaattactcaagatgatactaacttagttataaatgagttagaaaaacaaggaataaactttattgacagtgcaagagggtatacaataagtgaggaagcaatcggaattgccattgaaggaaaaagaaataaatttttcttagctactaaaagtatgtccagagattatgattcaatgaagagagatgttgaaataagtttaaataattttaaaactgattttatagatttatatcaattccataatgttaaagaagaggagtatgataatctttttaaagataaaatggcttatagtgcccttttagaggcaaaggagcaaggtaagataaaacatattggtataactagtcacaatttaaatactatagaaaaagctatagaagatggaaaatttgacactatacaattcccttacaatatagttgaaggacaagcagatgaagtgtttaaaaaagctcatgaaaaaggaattgggataatagtaatgaaacctttagctggaggtgctttagacaatgcaacactggctattaaatatatactatctaaagattacatagatgtagttataccaggtatggagagtgttgaacaggttagacaaaatgtcgctgtacttgaaaatcttgttctagatgaaaaagataataaggaaattgaagaaataagaaattctttaggtaaaaaattctgtagaagatgtgaatattgtatgccttgtgctgtaggaataaatataccattgagttttttatgtgaaggttattatactagatatggattaaaagagtgggctaaagaaaaatatgaggttatggatgttaaacctactgagtgtattgactgtgggctttgcgagagtagatgtccatatgaacttcctataagagaaatgcttaagactgttgttgaaaagctaggatagattttatttattgaaatcggtgtattaaatttactccgatttctttttattagatgtggtcttatatacaaatattaaatttacatagttatagctattatataaatttaatatttgtttaatacttattaaatatttgcttaatgctttttaaaaacatttgtttgagtatagacataacacaattattattgttgtattagtatagtttcaaatactggagtatcaatataatgtcgaataacacataaaatctttatttttcaaaaatattataggatatatcgtatttagatactggataaagttcaatttcaaccctagggttatctttatctataaaatcaaataaaaatactggcttaagttgtttatcattttttattattccacttttttcaataccatcacaaatactttttggataattatgtaaatcccccattctcttatttggaaagaataatttcaagactgttattagattttcttcaacagtttccccttgatactgttggtttataaaacctgcaatcatgttttcgtatgcaagatacttagaatattttccctttgaaggcatccatgcttgaccatttatgttatgaagcttaaaattagatttactaataggtctacctggaattgttattttaatcaaatttttcaccatccttatacagtatttattataatctgtatatgatttaaaagcaaattgttatttaaagtgtttttacagggcttgtttgtaaaattttccactttagatgtagtaatataagataagtattttgcttacaaattttaaaatttgatatatgatggacatattcatattagactattataagaccttcataatattaataagtataggtttagtaaagagagtaaaaagaaatccatataagccaagtaaagacttaataaatggcaatgtaaatgggatattaattataagaaaaaatcaatctttttgcattaactataggaagaatgtcaaaatataactaatgatatttgaagttttagagtttatattaaaaggtaagaaggttaagtgggtaaaaaaggttgaatagattaaaaaggctaagtatctaaaagagttaagtaggtaaaaaagttaaataagtaaatgaaaaaagctaagtatctaaatgagttagtagataaaaaaattaaatagataaaaagattaagtatctaaaagcgttagtagataaaaaaattaaatagataaaaagattaagtatctaaaagcgttagtagataaaaaaattaaataaataaaaaagactaagtattcaaaagagttagtaggtaaaataattaaatagataaaaagactaagtatttaaaggagttaagcagataaaaaagttaaataagtaaatgaaaaagacgaagtatctaaaagagttagtaaataaaaaagttaaataagtaaataaaaaagatgaagtatctaaaagagttagtaggtaaaaaactaaataggtaaaaagacgaagtatctaaaagagttagtaggtaaaaaagttaaataaataaaaaagacgaagtatttaaaagagttagtagctagaaaaggttaaaaagactaaaaaaattaaataaatttaaaaagtcaattagattaaaaaggaataattttatggataataaggaattaaaagcattttgtaatttaataggattaaactgtgtaggagtagcaggggtagataagtatgataatttagaaaagatacttaaggacagacaacaaaaaggttatttaactggtatggaagaaccaataattgagaacagaattaacccaagacatataatgaaggatgctaactctataatagtctgtgcatttccatatcatataaatagacaagaaaagaataaaaattcaaatttatcaaaatattgtcatggaaaggattatcacattgtagtaaaggactttttacaacaaatttgtgattatatttctaaaacagtaacagattttaaatacaagttatttgttgataatggaccattagttgacaggtatttagcttatttatcaggaataggatattttggaataaataataatatcataactgatgaatatggttcttacgtatttatagggtatatagtaaataattataaatttgaagaagataaaccactagaaaaaagttgttttaaatgtggtaagtgtgtaaaatattgtccgggaaatgctatattgggaaattatgatatgaaccccaaaaaatgtttatcatatataactcaaaaaaaaggagatttgtcagagaaagaaaaagttgttttaaagaatggcaaaaaggtatttggatgcgatatttgtcaagaagtatgtccacataatgttgaaatgccaacaactcatattttggaatttaaagaaaatataatagattatttggattatgatgagatacaaaatatttcaaataaagaatttaaaaggagatatggagatagagcttttagctggagagggagaaatataataaagagaaatatggaaataattttagataagtatgatgactaataataagagtctgtttcatatactttaatgtgtatttactttaacacttgttgtgtaaaagtcatattatatcattaaagttaaatatggggaggtgggggaatattgaaatataataatacatctgaaataaatccactagattatatattgggtcaagaaagagctgtagaagctatggaattagggttgaaaataaataatccagcgtacaacatatatatagctggtgaacctggaactggtaaaagtacttatgccttaaaggttttaaatgaatatgcatccaaaaaaaatacacataaagattggtgttatatatataattttgaaaaccctagagagcctattatagttgaattagaaaaggggtttggaagagaacttaagaaagatatggagaaattaattgaaagtcttttagaagattttaaaaatgcgtttgaaagtgaaaattttgaaatagaaaaaaatagacttctagatgaatatgaaatagaaaaagatatgcttttgaagcaaattaagaaatatggggaagaaaaaggatttaaattaaaacagagtaaaatgggaatagtttttatccctttgaaagaagaggaagatgaaagtgataagtctgatgaagagttttacaaagctaaaagagaactagaaaatatggcgatacaggtcgtatataaaattagaaacttagaagaaatagctgaaaaagcagtgttagagcttgaagaagagatagctaaacttgtagtagaacctcatatcaagagattgtgtgaaaaatatgaaaattatgataagattcaaacttatctggaaaatataaagaaagatataatagaatatatgtatttgttctatttagatgaagaggagttaaaagataagtatgataaagagcattttattaaatacaaaattaacctatttgtagacaatgaaagctcaaagaataaagaatcagcacctgttgtagtagagataaacccaagtccagcaaatctatttggaaaggcagagtatgattatgcaaatggaaatataaagactgatttcacaaaactattatcaggagcatttcatagggctaatggtggttatttagtactttatgcagaccaattactaaaatatacaatgtcttgggaaattcttaaaaagactttgcagactaaaaaagtaatattggaaacacaaacagcaattaaaccagaaaatatgccattggatgttaaattagtactgattggaagccactatatatatgatattttatatagatatgatgaagattttgaaaaatattttaaagtatttgtagactttgatagtgaaatggataaaaatgaagataatgaagaaggaatagcaagatttatagcataccaatgtgataagaataatttaaggcattttactaaatcagcagttgaagaggttattaaatttagcactagattatctggtgatttagaaaaactatcaactaagtttaataaaataatggaagttgtaatagaaggaagtgcttatgcagagtttagaaattcggagtatacagagcagtgtgatgttaaaaaagcaataagtgaaaagagaaaaagaatcaatagagtggaaacacatatggatgaatcaattgaaaatggatttactctaatagaaacagagggaagaaaagtaggagtgataaatggtctgtcagtcttaagtacaggagaatactcttttggtagagcttcaaggattacagcgaccactagcccaggaagtaaaggcatagtaaatatagaaagagaagtaaatatgagtggctctatacataacaaaggagtgcttatattaggtggctatctttctgagaattttgcacaggatttactattgtcactaaacgcatatgtttgttttgaacaaaattatggtggaatagatggagatagtgcatcttctgcagaattatatgtactattatcatctcttagtggagtatcaattaaacaaaatattgctgttacaggttctataaatcaaaagggtgatatacaagtagttggtggtataagtgaaaagatagaaggattttattctatatgtaaaactaaagggttaaatggtgagcaaggcgtcataattcctagaaaaaatcaaagaaatctcgttttatcagatgaagttaatgatgcagtgcgagatggaaaatttaagatatatactgttgaaagagtagaagaggctatagagatattgacagatgttaaatttgaagaaataaagaaattggtaaaagaaaaattaatatctttcagcaagatacaaactgtgtcaaaagaataagtttattatagaatttaatgggtatttatgtataataaaaagcaagaactttaataggtttttgctttttttgtaaatatatataaattaaattcttattttgtatgttttatatattgatgtttattttttgttgatatgactaaactatttataaatagtgttttataaattggtattttaaagggggataattatgaaaaatgtaaatctaaaagagataaatgaaaaagatgtaattgtggaagaagatataaatctaaaaggaatggataagaaagatgtaattgagaaggaagaagtaaataaaaaaagtatagataagaaagatataattgagaaagaagagatagataaaaaaaatgtaaagaaggttgaggttcaaaaagaaatagataaaatgattagtaaaaaagatgagataattgatgagaaagatatagagaattttaggtatattgaagaagataaaaaaagtatcaaagtaagtaaaaaaagtactaaaaaaggtgaaacggagaaaaaaacaaagaaaagtagttctaataaggctacacaaaaacaaagcaaagaagttaaaagtaagtctaaaattaaaagtgaatcagccaataaaaaagatgtaaataagattttagatgagttggaaaaattgtacccagatgctaaatgtgagttaaattatgggacagcctttgaacttttaatagcaactattttatcagcacaatgtactgatgtaagagtgaataaagttacttcagagttgtttaaaaagtacaacacagctagagactttgctaatttgagcattgaagaaattagtaaagagataaagagttgtggtctttacaaaagcaagtctcaaaaaataaaggatacatctgaacagctatgtgaattatatgatggtgaagtacctgatagcttagaaaagcttataaaattacctggtgttggaagaaaaacggcaggggttgtacttagtaacgcttttaatcatccagcaatagctgtagatactcatgtatttagagttagcaatagaataggaatagtggacgagccaaatcctcaaaaaacagaatttgcacttatggaagctataccaaaagaaagatggtcacactcacatcatgtattaatttttcatggaagaagaatgtgtaaagctagaaatccagaatgtgcaagttgcccaataaaagaagattgtaattattataaagaacttaatgaaacgaaataacttttagaaagtaagttgtacaagagggattttctgatataataatacttgtgaaaatgttagataaaaaactattatatacatgaaataaaaattattattaacattattttatataatagtataatattattgttattctgtttataaaataaaatttgataaataaaagcgatacttagggaggattaaaatgtcattaaatatagtattagtagaaccagaaatacctcaaaatacaggaaatataataagaacctgtgcagcaacaggttcaactttacatttagtaaaaccactgggtttttcattggatgataaacacctaaaaagatgtgggcttgactattgggatatagctgatatacaatattacgatagctttgaagaattacaagaaaagtatccaaatagtaaatactttttttctacaacaaaggctaaacagtcacattcagatgtgaaatatgaagaaaattgttttatagtatttgggaaagaaacaaagggattaccagaacctttgttgaaagcaaatatggatacttgtattagagtgcctatgttggatgttgaaaaggctaggtcattaaatttatcaaattcagttgctattgtagtgtacgaggctttaagacaaataggatacccaaatatgaggtagtttcaacaagcctaaatgagaaaggagcatacttaatgaaaaatctaaagataatctgtgacagtttatcggacgtgccaaaagatttgttagataaatatgatatagatatagtttcattaacagttatactggaggaaagagaatacaaggatagaattgatatatctggagatgaattttataaaaggcttagagaagaaaatgtatatccaaaaacttctcaagctacttatgcccaatttaaggaaatttttgagaaatatacaaatgaggatagagagatactttatatagcagggtctgccacagctacagggacgtatcaaagtgctgtaatggcaaagaatgatgtggatggtaaaatatatacatatgactctaacttgctttgtatgggaactggtttacttgtaataaaagcaggagaacttgcaagtgaaggaaagtctgttgatgaaatattacctgttttggatgaattaaaagagaaggcttttgttatattttcagtagatacattggaatatttacaaaagggaggtagaatatcatctactaaggcagcaataggaagtatattaaatataaaaccgattcttgaaataagagatggactagtttcgcaaatatctcaagtaagaggaaagaagaatgtaatttctaagatgatggaattgataaaatcaaattgtggggatgatttatcagaccaaattgtgtatataggatatagtgatgattttaaggaaaaagaacaattatctaaggttatgcaagatgaattaagacctaaagaaattagatttttccaaattggtgtgtgtataggtgcgcatgctggtcctggtgtcactggtatcatatgcttaaaaaataaataatatatttttggatgacattatttatttttttattaaattaggatagaatattaattattgagatgttaaattggatttattttggatgaaattaagtgttgatatattagatttagtttgtagggaagtgtgtaaatagataagaatctattgcacacttttttatagtaagatttattaaaaaaatttcaaaatgtacttgtaaattgtatataaaaaaattataaataggatgtaaaagtaaataggatgtaaaagtaaataggatgtaaaagtaaataggatgtaaaagtaaataggatgtaaaagtaaataggatgtaaaagtaaataggatgtaaaagtaaataggatgtaaaagtaaataggatgtaaaagtaaataggatgtaaaaatatcgtaaatgtatgaggagtgaaatttaatgcgtttcaaaagaatattgatattgatgttaactgtagcaatgatagctggaatgttggttgggtgtgctaataacccaagcaataatcctagctctagcaaagataataaaagtgatataagcgataaaagtaattcaaaaaaatctgtatcaatgatactagatattgaaggaacaaataatgaagctatgaataatgcagctttattagcattaaacaatgctcaaaagaaacttaatatagatacaaacaaagtggaatcagatgattcctcaactttttctaatagtatagatattttatgtaatgacaattacgatttaattatagctgtaggagctagatttgcaaaaccattggagatggtagccaagaaatatccaaagcaacaatttgcaattatagactatgagtatgacaagcaaccttctaatataacttcaatttcttatgaagataataaatctggatacctagctggattaattgctggaaaaatgactgaaagcgataaggttggttttataggaggaataaagagttctagtagggataaatttgaatcaggttttagagagggtgttaaattttctaatagtagtataaaggatatttcagttgagtatgcagatgtttttaaagatagcaaatcagtagaatctatagctaaaaaaatgatggataatggagtggatattattttttctactactgaagatgattcaaaagctgtaatagatgcagtaagggcaaaaaataaaaaagttatagcaacgaataaagaccaacatgagttagctccagaaaatgttataagttctattgtaaaagattttgagaatcctacttataatctgatacaaagttttgtaaaaggaaattataaaggcggaaaagttatagaaaacacagttaagtctggaagtactgggcttgcccaaaatagttctcaaaatattcctccagatgtgttagaatatgttaataagaacaataaataatctactataatatccaagaatacttatgactttagttatgaggtgaattggatgttataatagacatatatagaaagacgtatgcagaggtaggcagacctatctaaatcagggagtgaattttgtgaaaataaaaaggatattgatggcttgctttgtagtagtttttacaatttttatattagctatatgtaactttgattttggatttgataaagtaaataagaataattctaatatagatagtgctaaatcgaaacagagtgagtctaaaagtgtaccaacttcagcagaaaaggataaattaaatagtaaaagtaagaatgaagaagatgacacagaagatgattcatatgtaagaaaaactattggagtattgttagataccgaaaacttaaataacgaatcatataataataatgtactatcagccttaaaaagggctgatgaagattttgatgttaggataaaacttgaaaaaccaaagacttctaaaagttttaaagagagtatagaaaaactacataagtatgaaccagatttgataatagcagttggagctagatttgcagagccaattaaagaagctgctactaaatatcccaaacagcaatttgcaatagttgactatacttataaagttcagccagctaatgtaatttctgtatcatttcaagataatgttactggatatttagcagggcttattgcaggtaaaatgactgatactgggaaagtcggttttataggcggagttgagggttctagtagagataagtatgaatctggatttagaaaggggcttaaaacttcaaataaagatgctgagttactagttaagtattcaaatatatttgaaaaccctgaatcagctagaactattgcaaaggaaatgagagattctgatagagatgttgtattttcagctacagaagatgatagtaaaagagctattcaggtagcaagagaaaatggtggtaaagttatagctattaataaagaccaatacgatatggctccagataatgtaataagttcaattataaaagatgtagaacaacctgtctatgaactgataaagaacgttgcaaaagatggttttaagggaagtaaagtaatggaatttaaaataaaagatggagaacttggcttgacttcaaagagcagtagaaatataccaccagatgttttggaatacataaaaaaagagtataacaaagtgaaagatacatattaattattgatgtagaagattataaaaatatactgtttaagtttagattagcaataaaaagatatatttattaaatttgtgctaactgtacaaaatatattgattaagtttagattggtgataaaaagatatatttattaaatttagtctaactgtacaaaatatattgattgagtttagattagcaataaaaagatatatttattaaatttgtgctaactgtacggaatatactgcttaagtttagattagtgataaaaagatatatttattaaatttgaaccaactgtacaaagctatactaattaagcttagattaactatataaaattataacaataagtgtgtgggcagaaaaattctgctacacactttatttatattcatataaaaaaattatcaaaaaaaagaaaaaggagtaaaaaatggaatttacaagagaaccatttatactagatgacgatttgtgtctagctttggtggacaaaagaattagttatctaatggaaaatgaattaaaattaagaaatatagagataataaaaacaatagaatgtaaagaattatatgaaagcataaaatatcacccggatatatgtatttgtaatttaggaaaaggagatataattgttgcgccgaatgtatataatcaatacaaagagttattaagtagatataaatttaatataattaagggagaagctaatttattaaatagatacccttatgatataccttacaatattgcgatagttggtgactatgctatacacaattttaagtatactgacaaagcaatattagattatattgaaaataataaacttaaaaagataaatatagagcagggctattctaaatgctcaatctgtatagtagatagaacgtctataataacatcagataaaggtatttggaaaagtatgaagaatacagaaatagagtgtttattgatagaaaaaggtcacataaatttatttgagatgaattatggatttataggtggatgtacagggttgatttctaaggataaactagctttttgtggagatgttaaaaaacatcctgactatgaacgtataaaaagttttgtagaaagtaaaaacaaggagatagttacacttagctgtgaaaatttactagatataggttctatagttcctctcatgacaagaaaggagcgataactttggttgagaaggataatatttcttccatgaaatttttgaggaataataatgtaaacgatagattaatatatacgaatgacattgtagaagtagtgatagattctgcaaagcaagaagtgttaaataaaaaaatacttaatggtactaaagctgaacaaagagctttaaatattgatgagatatcaacggaaataactagtatgataataagtataatgaaagagaaacttttgaaagaatacattctaaaatgctatgggcgtacatatcctgaagataaaaataatatatacatatattcactgaacatatttgctaaaaaagagatttttatgagagaaacagtatttactagggtgagaaattatatagaagaaaatgattttataaatgtagaaggttttattagatttagaatgagagaatttatgaaatatatttctgctataggtgatattgcagttgaggagtatttaataaagaaagaccaagatgaatttataagagttttaaaatactttatagatactcaagaagaaaagattgatttgcttaaagttcatataatggaagataatacatttgttttatacgataaaaatggaaataagatagacagtatagatgatgaagaaattataaatatggtaataagagaaaatttaaattatgaggactttttaataagtaccttattaactctatgtcccaaaaaaatagaaatattggatttgttaaataataattgctcaaaggaaattatagatactgtagaagcaatttttgaaaataaagttagtataattatggaaaactagaatctaagcatataaaagctagccatataaaattaaaaaaattctttttaaatcgacacaaaagacttataattgtatataaagctatagtataactagagttattaagtataaagaatatctacttgattaatgcaatatagctggcaaatatacaattgataaggagtaattttataatggataatttaattaggatactgatattagctgttattggtggatttataggttatgttacgaatgtagttgctataagactgatatttagaccaatagagcctattaaaatacctattttaaatatagaaatagtaggtcttataccaaagagaagagcagaaatagcagcaaatgtaggagaaataattcaagaagaatttctttctatggacgaaatacttgcaaatatcattactgacgaagataaggaagaagttgtaagatacataaaagcaagggtaaaaattataatacatgagaaagtttcatttatcccgagtggtataaaaaacatgatacaagattatctaggagagataattgagtctgaagttaagcaaagtatagatgaattgagtaaaaatataataaataaagcaaatgaacgtatagatatacaaaaaatggtcgaagataagattaatgaactagatttatatgaattggaagagataataataagaatagctaagaaagaattaaaacatatagagtttttggggcttgtcttagggtttttaataggtatagctcaagggttaattactatgtttatttaaatatatgagaagtagcatttatttaagtactaattatatttacctatttgagtgaattacttattaatagtatttagatattaattgtatttacctatttgagtgaattacttattaatagtatttagatattaattgtatttacctatttgagtgaattacttattaatagcatttagatattaattgtatttatttatttgattgtgttacttattaatagtatttaagtatttactgtactacttattaactatattaagtattgattgtatttaagtatacaaaacctaaaaagagtacaaaaattagaagttagttttaataaaaattagttttagtatttatctagtcatatctatcatgcatgtggatacgttttaaaaattttaaatttatgaaaatattataatatcactataaatcaagagattaatttaatataaaaatataagaatattggtttacagctgattgagatgaaaaataatgggtaattaatatattacattaatgttgattgatgtataactatctgttataatgaaaatatattaaaaatcatagtgttgaagaggaagagtagagtagaaaccattctcagagaatttgggtctatggctgagagcccatgtaataggtctatttgaaaactaccttggagctgagcttattagcagtatttgtatttgtactatacgtgaaagtgctcgggtgacgaccttatagtcatcaagagggttgtatatacttgtatacgccaacttgggtggaaccgcgaattaatatcgtcccaaacatatttggggcgattttttattacaaaaaatctaaaaattatttcaataaggaggaaaaaacaatgattaaagttgctttaaaagatggctcaataaaagaatttgaaaatgctatttctgttatggatgtagctaaatccattagtgaaggattagctagaaatgtggtagcagcgtctgtgaacggagaggttgtaggtctggaccacattatagatactgattgtgacttgaatttatttaagtttgaagataaagaaggtaaggaagtttttagacatacatcagcacatatattagctcaagctataaaaagactttacccagaagcaaagcttgctataggaccaagtatagaaaatggattctactatgatatagatttagaccatagattagttccagaggacctagagaaaatagaagctgaaatgaaaaaaatagctaaagaagatttaaaaatagaaagatttgaacttcctagaaatgaagctttagagcttatgaaagaacaaggagaagactataaggtagaacttatatctgatttacctgaaagtgaaataatatctttctacaagcaaggtgattttactgatttatgtagaggaccacatttaccatctactaaaaaggtaaaagctgttaaattacaaagtgtagcaggtgcatattggcgtggtgacgaaaataataagatgcttcaaagaatatatggaacttcttttgagaaaaacaaagacttagaagagtacttacatttactagaagaagctaaaaagagagaccacagaaaattaggtaaagaattaggattatttatgatacctgaagaaggtccaggattccctatgtttttaccaaaaggtatggaacttaaaaatgaattattaaaattctggagagaaatacacagaaaagctggatatattgagatagaatctccaatcatattaaatagaaaattatgggagacttcaggacactggtatcattacaaagaaaatatgtatacagttaaaatagatgatgaggattatgctataaaacctatgaactgtcctggtggattaatttactataactctcaactacattcatatagagatttcccaatgagagttgcagagcttggtagagttcatagacatgagttatctggtgcattacaaggattaatgagagttagagcatttactcaagacgattcacatatattcatgttaccagagcaaattaaggacgaaataaaaggagtagctaacttaatagatggtatctacaaaacttttggatttgaatataatttagaattatctacaagaccagagaactctatgggaagcgacgaagagtgggaagcagcagaaaatggattaagagaagctttagaagagttaggtctaccatatactattaatgagggtgatggagcattctatggtcctaagatagacttccatctaaaagattgtttaggaagaacttggcaatgtggtactatccaattagatatgcaacttccaagacaatttgataatacttatattggtcaagatggtgaaaagcatagaccagttatgattcatagggttgcttttggtagtatagaaagatttataggtatattaatagagcattatgctggtaaattcccagtttggttatctccaactcaagttaagatacttcctatatctgataaatttatggattatgcaaatgaagttaagaaagagttatttgataagggtataagagttgaattagatgatagagctgaaaaaattggatttaagataagagaagctcagcttgaaaaagtgccatacatgttaatagtaggtgaaaaagaagtagctgataataatgtttctgttagatcaagagataaaggtgaaataggtagtattaaattagatgaatttatagctagtatttcaaaagaaattgaatcaagagaaagtattattcaagactaatatataatatattagtagctaagatattgttatataagataagtttaatcaatatgttgatatgttgatacatagtgattaaatttatgaaaagatgagtataattagaggtacagttaatcatatttttatgattaatgtacctctagttttttgtatggtagatttattaataaatatatcatagaagtgttttgaacatggaaatatttatgtgcattctttaaataaaagtttattttttgaatgataattaagtgcttgttggtaaggttatggctgtaaaaatcataactttatttttatatttgttccattttcataaaaattattatccctttaagaaaatttcttaatcctcttgaaatatttcctttttagtctaaagttaaatttctttcttcaaaatgaatatttaaatgaactaaaatttaagtacattttctaatcttatgagtctatttttcatagataattgccctataatagaagaatctatgttggggctatgtggtgacaataacagcattgtcagtgattaattaatgctttataaatgattaattagtgttttatgttatttttggacttaccctctatacatagattaatttatttaactttagatatagagagaatgtcaagtacatacacagacattagagtttaagaaagtgtttatggagcaagaacttttaaaagaagtagtgacttagtttaatttcaagaaatgataaatacaaaagaggaaaaagagaggtgttgaaatgatagaaaaagtagaagaaaaatctaagattattaaaacatcaaaagaatataagcgaactataattgaagaaaaagataaagaatggaccaaaaaattaaatgatatacttagtagaagtagtttttgtaatgatgaattagataaaatcaaggcgttaattccaaaagagattttgactaatgaaaatgttggagaagttgtgactgaagatggatatgctaagcccgagtatgatgaggtatttaaatcattgttcactttaaataatgaatatgatttacttgtaaattttataaatgatattctaaaagatgctccatatgctaacaggaatatcaaaccgttcactcaaataaagagaataattagagttgaaactgatccaacaattaattacattggagagaaaagacctagacttgattaaaaaatagctacgcacacttgtgactttagtcatgagttagtagctaaaatagtcagcatatagggaaacttatatgtagagataggatagaacctatccaatactacttgaattgctaaaaacccctaaagctaaccaaactaaaacataaggatgaaataaacctaagtgtgaaagttacgaaagtagaaaaaattggttagatggtataaggttaaaccctaagtactttaaaatgggcaatcagcaggtaagctccgaataggagaagcttcaacgactattcctcttgagggaagtacactacaagttattggtagtggaagtgggtagaccttagcggataatgccgaaggataagatatagtctgtgcttgaatgaaagtgtaagaagttcataagagaactgcataggtagtagcgaacttatgtgaacgacaacctcaaaaatgataaaagttaagacttacggttcttatatatgttatttaaaaataaatataaaaaaccttcaaaatacttgttttaagtaattgcatattttaatattatgataggtgatgaaaaatggaagttactcatggtagaggatatgcatatagtatgtcaaatacagacatccgtattatggggagacatctttggaatcctagttatttcgttgctactgtatcagaaaatacagaggagcagataagaaaatatattaataatcagaaaaaacaagtaaagtgaggtggtagtagtggaaaaagcttataagtttagaatgtatccaaataaaaaacagcaagagttaattaacaaaacttttggatgttgtagatttgtatataataagtatcttgctaaaagaatagaagtttataaaaatgctaaagaaacttttacttataaacagtgtagttctgatttaaccaatttaaaaaaagaattaaaatggcttaaggaacctgacaaattttcactacaaaacgccttaagagatttagataatgcatataaaaaattctttaaagaaaaagcaggatttcctaaatttaaatcaaagaaaattaatagattttcatataaaactaactttacaaatggaaacattatgtattgtggtcaacatataaaactacctaaacttggtatggttaagataagggataaacaagtacctaaagggagaatacttaatgctactatatctaaagaaccaagtggtagatattatgtatcattatgctgtactgatgtagatattgaagcatttgaaaatactaataatcatataggtttagatttaggaattaaagaattttgtatctcaagttgtggagactttatagaaaatcctaagtatcttaagaagtcattaaacaaacttgctaaattacaaagagaattatcgagaaaaacaatcggtagtttaaacagaaataaagcaagattaaaagttgcaagacttcaagaacatatagccaatcaaagaaatgattttctacaaaaactatctactaaattaataaaagagaacgatattatttgcatagaagatttacaagtaaagaatatgattagaaatcgtaaactatctcgtttaatttcagatgtatcatggtcagagtttattcgtcaattagaatacaaggctaattggtatggtagacaaattgtaaaggtaggtaaattctttgcaagttcacaaatatgcaataaatgtgggtataaaaacgaggaagtgaagaacttaaatataagagaatggatttgtcctagttgtaatgaaactcacgatagagatataaatgcaagtataaatatattaaaagaaggattaagattaataacaattcaaaataaataacttatgtaagaaccgtaggaactacggggatagcctgtggagaattagtaagacatatgttagtatgcaaaattctatgaagcaggaaccctgtgactttagtcatgggaggttcagattttggctgaagatgaagaaaataatcatataaatattgagatgcaaagagcttttgagaacgattatttggaaagagctgaatattatcttagtcgtgtacatggtagaaagttagaagaaggtaaagagtataaagaaattggaaaaactattggaatacatatactaaatcatgtaaaatataatcacatagaagattatgtaaattgcctgagattaacaatggacgagcatccagatatttattctagtaaaactgcattatattttatagagcttccaaaaattcataaatctgactatatagtaaatagaattatgctatggggaaaacttattgataatccttctagctcagatgtaagagttatagctaagaatgattctattattaaaaaagcacttgatagattaaaagaattaggtagcaatgaagaatatttattaaatctgaaaagaggtgcttatatcatgaataaaagtagaaattttaaagaagagattgaaagagagacagcaattagagttgcaaaagaaaaagattataaaataattataatgttgaaaaaaatggttttaaattagatgacatattgaataaatttaatgattttgacttaagtgaagatgagataaaagaagtatatgaaaataattgatgataaataaaaagtgaacttatataagtttgctgaatctgagcctggaaatatttatgtgtattttttaatgaataaaaatttattttaaaaacaataattagaggtacagttaattatatttttatgatactgtacttctagttttttctattgtagatttattatttactaataaatctacaatagaagtgcttttgttgtaagaatcattttatctaatgattgttttttataatagttaaatttccatttgtagtgcttaaatataaatttgtaataccatttttataagtgtataaatcactatgacgattcaactcaaagtcactgtccaaaacaccagaaaccttatcaaaatttaaagtgaaacctggattatcaggaatagacaaatcgacattggcagaagtagtttcacagtacagagaagacaacattttgctagaattgatttttatattactgctagttgactcagctttaatgtcagaaaaaactccagataagttcatttttccagaaactgaactacaagtaagatttttattgtatatatcttttaaatttatattgccattagttgtttctaagtttaaaacatcaattttcccagaaagctgtatttcaccagatgttgatttgagtgtagcatttttactatttagttttgttatatcaatgtgaccactagttgtgtctaaatttattttattaatattaccagagagacctattgcacctgaaattgtgttagcttcaactgtattacttcttatgtaagtgctatatatatctgctgaagtagtatataaggttattttatcataaagcttattgggcaaatatagttcaagtattgttggttttggaagattaattccaatgaagaattttttagttgaattatcatatatagaaagagaatttccgtcaaccattatttttgctagttttttctttgagaaattactagggattttttgaattaatttgattttattagaatcacttctcttaattctaacttcacctgaaatccaatcaacattaatgtcatttattttatctgaaaaactttcatttttagccactatatagttatcataattgtatttaggattaagagtattaaaagggaaattaaaagaatgtgaaattatagttcctataaggagtgagataaatacaatagaaagtgatattgccaggatactccagatgaaaatctttgcctttataagctttttattcatatttatcctcctccttgtagccttttagttgtataattcctttgacaatgttgacaccagcagcacctattataaatagtatccacgaaaaggaccaaatattaaatagtatgcttgtgattagatatatagaaactactataatccaatatgcattcataaatgatttataaactggatttatatgattataattttcctcaaaatcctcaaattctttgaatttatttgataaattatcattgtatagagcatagtttgtccttgtcatttgattatagactaataaacctactccaagtgctattaatatgagcattaaaagaatagctatagttggttctatgccaaaacttacaactgagactacaaataggaaagggcttattataaaaagagcaactgctattgatgctcttaaggctcttttctttttttcttcaattaattcagaaggtagagaatatggttccttaacactttcaattaactcagataaatcaccaattcctgagattactgagttatatgcttcttgttctgttttaccatcttgtatttggtcgttatacttttcttttagattttcaaataattcatctttaagttctttgactttttttgtctcattaactcctgtaaagctactgtcaatataagtacgtattttgtctaacatattttcacctcctaaattaatatatctatcaatgcttttgtattattccattcttcacggctttttatatatttctctttacctatgtttgttattgaataatactttcttctagctccagtaacttcatcaccccaataagaggttattgcaccagattgttcaagtctacgaaatgctgtatacaaagtagcttctttcaactcatacaatcctttggttttttcaagtatagatttattaatctcataaccataactgtctttttcaagtaaatgttttaagataattgtttctgtatgacctcttatcatgtcagatgcgattatcatgaaaatcacctccaattaaatatataatactttgatatacttcgcctgtcaaggtatatcatgagaaaagacattttattgtaatatttataaggttttatatagaaataatgtaaaaactttataaataatatattttatacctagttatagataactttatatagttattattaaaaaaagcaataaaaagtttaattcaatttagcaaatttagtgatataattaaaaaagaaaagaaatatggacttatttggaataattttgacaatctatttactacacgtgtagagtcgtatataattaaattatacataaaatataaaaaaataatttagtaatacgttaggagaaagtattatgataaagtcaagcttattttggaatattttcattgcgatatcctttatgatagaatggtttctttgtaagaaaatgctagattatacaagtgagaaaaggatttctaacaaaaaaataaacttttgtatggtaggtattattgtttttgctgacataatatatttttttgatgtacctccaaatataagagtaattatatctatgataattactattgcattttataaaatctcatatgatgtgggatttataaagtctgtattaatatccttaatttattggatgttactaatcgccacagatgctttgagtatatctttaacagtttggcttaattctataaatgacatgagtagtatggggacgggagatatatacagaattgagtctataatattgggaaagatacttttgattgtgtctttgtttttatatagagccttaaagataaaacttaatatagaaataaataaaaggacattattttatatagttattcctatagtcgctaatatagcatctttttttgtaatttttgaatacatatttaatccagggtctggtagcttaatacataatttccaattcgttatgatttctgttgtattgcttatatcaagtatcactttagttttaattgctaaaaaattacagcaatataatactttagttgtagaaaacaatatgattaaaaatactttgaagtatgaaaatgagtattatgaagatatagaaaagaaatatttaaaaactagattactaagtcatgatatgaaaaatcacatactgtgtataaatgctatgattaaaaaaggtattgatgttacttcttatttaaataatttgcaggtagaaattcagagtaatgacttgttatttaatactggtaattttatattagatgctatattaagtgaaaagaaagaagtttgtgataagaatgatatagaactaaaaataggaataaattttagttgttgtgaagctgttgaattagtagatatatgtcatatattttcaaatattttagacaatgcaattgaggcatgtaataaaattgatagtggaaatagagttatttgtgttaaaggtgatgttatgcaaaatttttatttaataagagttgaaaatactaagatgaataagattattactaaaaatggagatattttgacagacaaaaaaggttctcttcatggacttggaataaaaagtgtaaaaaactctgtaaataagtatggtggtaatgttgtaattgaatatgatgataaaaaatttgtagttaaaattgctattccacttagaaatgtgaagaaagcagttaatcatgtgatttaaatgtatataaatttgatgtgtagaaatttaatatataagaattaatgtataaaagtgatgtatagaagtttaatatataagaattaatgtataaaagtgatgtatagaagtttaatatataagaattaatgtataaaagtgatgtatagaagtttaatatataagaattaatgtataaaagtgatgcataaaagtttaatatataagaatttaatatgtataaaagtgatgcataaaagtttaatatataggaatttaatatgtataaaagtgacgcataaaagtttaatatataggaatttaatatgtataaaagtgatgcatagaaatttaatatataagaatttaatatgtataaatgtggtgcatagaagtttaatgtaaaaatttggtgtataagaatttaatatatatatttattttaatatataaattgaagatatataattaaatcatataatgccacttgtatattagaattgtttattgagtattagaaacttttaaggttagaaagtttatgactattatacattatattatttatagtatttattatagattatatagtgagtttaaaatattaaactttttattctacaaaatataaaaagaagttgcatcaaaaagagaaatgctctttaaagatgtaacttctatggtatatgtatgaggagctatattgccatctctggaatcaagcttctcatagcttctatagttgtttggataagcttatcaagttcccatccaagcatttctgcaccacttcttataacgtctcgagaacagccagcagcaaatgatttatctttaaatttcttcttaacagattttaattctaaatcagaaacgctctttgaaggacgcattattgcaacagcaccaattaaaccagtaagttcatccacagcaaataatactttctccataaattgctctggtttaacatctgaaccagttaatccatatccatgacttattgtagaatcgattattgatttatctaaatcaagctctgtcattaattctctttgtttaacacaatgttcatcaggatacatttcaaaatctaaatcatgtaaaagtccaactatttcccaaaagtctactctctcagggtcgtactcctttgcatagtatctcataactccagatacaatttgagcatgtcttatatgaaattcttccttattgtattttcttaatatttcccatgcttgttctaaagttggcatgtaactcatttttatcactcctctagctgaatattttgaatttttataaagtttattttccattgattatatcaatcaatttctaaaacgtcaacatactgatacgcaattttgcatttaaattcagaaattagtgaaaattaaatctttatatctaaattctttgtatctaaagattttcgttcctcaatgttatctttgatacaaatgctataagtagtgtaataaatccaactcctagtataatgatgtacactctatctgataataaatcaaaaagtttaccatacataacctgaccaagaggcattgcaattgctgttcctgcaaaaagaattgacattacttttcctaagagttcatttggagtttttaattgtgtgactgttataacatatattgagataagagtcgttgtaaaaaatattagcatagatgatactataaagattaaaaatggaactggaaatcctgtgtttaatataaatggatatactgaaaccgccattggtatgaacataactgcacatataataaaggaaatgtgcaaattagtgatttttagatgttttgagaaaataccaatactaacagcagctaccagtgaactaaaagaaattgctccttctgctagaccatataagaagttactagctcccatagtgatttttactatataggggataccaactattaacatagagcttaaaaataagtttattgctatagctaaaaaaagtatttttagtataaatctattttctttacatatatgaacaataccatcctttatatcagtaaatatagtttttataatgttgctgttttgctcttgtttgataaaaggaatctgtataaatatctccataattgcagatagaaagaaacttacacaacttataactataattgcattaattccaatcacaccatacaagacacctcctaatacaggtcctgcaatatttgtaagagatgcaactccagctacaataccatttgcattcattaaatgctcattatcaactaaaaggggtgtacttgactgaacagttggttgatacattgtgcttataactgataatatggtcataataattcctacaagtaatattgaaccattattgttgaataagaatactgctaagattagtactgtaagactgcttgaaaaatcaaaaataaccattaagtttcttctgttgaatatatccgcaatagctccaccaataggggagaatactataattgggattgaagatactgctagtatagtagcaaatatttctgctttaccagttatatcaagtatgtataaagataaagcaaatttaagtattgatgcaccaaacaatgagattatttgacctaatatcatcaagttgaagtttttattaaaagtgtttgaggattttaccatatatatacctacctatctaagattattaaaatatttataataattgatataatagcaattattataaggaatttttttcttactttaatatctaatattattagaaatatacgaactattatagatggcttagagtagagtggaatgagttaactctggggtctataagttttgtgtgtatatttagtttatcatttattttgtaaatgatattgtttatttttttcattaattcaatcatattaatcctctttagtataaagaaatatttagaaaaattattttaaattgttattcaagtatgtgttctacaagattatctaccataaaatcaaatacttcaatatagttatattcaatattttcttttaccaatagacttgatagtagagaattacaaacaccaaaggctttttctttttctatcttcaacttgagattgtgtctcttaattaagtcgtaaaaactttgtatgttattggactcaagttgtaaaaacatatcttgaggtagtttatttattaggctgatgaaatcaggattatttggtgaatataaaaatggatttttatcatataatcgatataacatttttaaggattttgcaaagccttcttttggaggcatgttacttaaaatttcatctactgatgatataagtctgttttggattccatttagtacttcaaaaaataacttttcttttgaatcaaaaaatgtatagaaagaaccctttgcgattcctgattttgaacaaagttcatcaatgttagtttttttgtatccatatttagaccagttgatttcacattctgaaattagtctttttcttatattgtctttttctatttctgtaaaacttttagccatttttatcaatcctttctatctgcatatgctatctatgactttaaaaatattttaagtcatagatatataatattgtctacttataaatttgtcaagtgatttatgtttataatatttatattggtatattggtatattggtatattggtatattgatattaaagtgtgacctatatagatttggagcgagtatgttattaaaatagaagaatctagaaaaacgttaacttaaaattttttttataggtaaacgtttatgaaaaaaagaaatgtttacataacgaataaatggctataatttaaatacacaaagttatatcagagagaggaataaaaatatgtttaatgaacttaaaacaaaagaaaatgtatataaaaatttaataaatggaaaatgggtagaatctaattcgagaaagccaatagaaatttactcaccaatagataattctcttgttgggaaagtacaatctatgacaaaacatgaggtagatgaggttataaaaaacacaaaagagagtataaaagtatgggctgaaatgcctgtatacaagagagccaatatatttcataaggctgctgatttattgttagaaaatatagatgagatagctaatatactggtacttgaaatagccaaagacataaaatctgcaagggcagaagttgagagaacagcagattttttaagatacacagctgatgtgggaaaaaatatggagggtgaagccattagtggagataatttccctggtggaacaagaaataagatgtcttatgtttcaagggttccattaggtactgttttagctatatctccttttaattatcctgtaaatttatcaatgtcaaagattgctccagcgcttattggtggaaatgcagttgtattaaaacctgctacacaaggggctattagcgcacttcatgtggtagaaatcatgagaaaagctgggataccagatggagtacttaatactattacaggtaggggtagtgagataggggattatgttgtaacgcataaaggaattaattttattaactttactggtagtactgaagttggtcagcatatatctaaaatatctggaatggtaccactattattggagcttggtggaaaagatgcggctatagtattagaagatgcagacttagattttgcagctaagaatatagtatctggagcgtattcatattcaggacaaagatgtacggcagtaaagagaattttagtacaagagagtgtggcggataaattagtcggaaaaataaagccattggtagagaagttgacaattggaaatccaatggatgaagtagttatcactcctcttatagataataaagcaactgattttgttcaagggttggttgatgatgcattacataaaggagcaaagttaataacaggtaatgttagaaaaaataatttattctatccaacattgttagataatgtaaatgttgatatgaaaattgcttgggaagaaccatttggtccagtacttccaattataagagttaaagatataaatcaagcaattgaaattgctaatcaatcagagtatgggcttcaatcatcagtatttacaagtgatattgatagggcattttatatagctgataaacttgaagttggtactgttcaaataaataataagactgaaagaggtccagaccacttcccatttttaggtgtaaaggcatctggtatgggaactcaaggtgttaagtattcaatcgaggctatgactagacctaaggcagtagtggtaaatgttagggagttgtaataaataaatagagataaagaatagtagagataaagaataaaggagttgtcttaaatttgattttttgtaattgaattttaagttcaactccttttttgaatctttatatgttatttcttagtaattctttttttattaatatcttaaactttgatattgatgaaatttgaacatgataaatatctcaaatttatagtcttgttttctaatgatgaagcctatttctacttaaatagagcaatttctaaaatgaacatttttatctcgagtaccatatacaatgaaaaaaattaaccttgacaagtgaccgatggtcgctgtatgataaataaaaaagaaacgaccattggtcgctaaaaggaggtatcgccctatgccaaaaggaattgtgcttacacctgaacaacaagcagaacgccgagaaaaaatagttgctgttgctttgagtctcatggctgaaaatggattccaaaaaacatcaatgagagaaattgcagttttagccaacatgggaaagtcaagtctatacgattttttcaaaacgaaagacgagattgttgtatatgcagttgagaaagaaatagaaaaaactatccaacaagttcataggattattgatggtgaaccttcaccacaacagtgccttagaaaaatcatgcttaatcatcttagatttccagagcagtatagaactgtactgatgtggttaaatacagaatctgattatttagaagaagagtatcgaaagagacttaaagatgctcgttatgcatatcaagatattataaaatcggtaattgataatggtgtgaccacaggcatctttcgcaaaacggataccgctcttgtgacacgtttgttaattaactccatgttatcaatcagctacacgtcacgaccatcggatagttcggaaaaaatgttggatgaaacaatgaatatatttctgcacggaattatgaatgatggaggtgaatgattatgatttattatgtcttgccactggaacataaacaagcaaccattgaaattgttggtggaaaagggatgtctttatcaaaactattgacagcaggcatccctgtgccagacggttttcatgttacgactgcttcataccagatttttgttgagacgaaccatattcagtctcgaattaataaactgctagatggtattgattccaataataccaaccaacttgaagatgtatctaagaaaataggggagcttttccataatggagaaatgccacaggaagtgtcggacgcaattaaaacagcttatgccggattagggaacatatcggtggctgttcgttcgtctgcgactgctgaagatttacctgacgcttcttttgcaggtcagcaggaaacttatcttaacatacaaggtgaagataaagttattgacgctgtaaagagatgctgggcttccttatggacagctcgtgctattgcttatcgtgtgaagaataatataaagcacgagattgtcgcacttgctgttgtagtacaaaagcttgcattttccgattcatctggtattatgtttacgttaaacccaatcaatggtagacgtagcgaaatgattattaacgctgcatgggggcttggtgaagcggtggtttctagcttagttacacccgatacaatcgtagtggataaggactccgaacgaattatatcgtatgaagtggcaaataaagagattatgacggttcgtacttcagaaggaacagaagaaaccatggttcctgaaaggttgagaaaaaaatatgctcttactcgtaatcaggtaatgcaactgatacagcttggaaagaaaattgagaagtattatcaaatgcctatggatgtagagtgggcactggaaaaagataaattgtacattgttcaagctcgtccaattactgttctgccaccggaatgggtattgccagaacaggatgttgtatacacaaagggaagtttggcagaacacttgccaaatcctgttacacctttgttcgccacgcttggtcttgaaatcgtaaaccgtgcatcggagcttttatggatagatatgtttggtaaaagtgcgaaaaaattattaccaaaaaacggcgcatatacggttattaatggatatgtttatctttctgctaaatcaaagccacttttgattgctatcaaatccctttccccacgctctttacgtaggacacttatgaacagcgttgcacgctgggaaacggcacgaaaaggatatgaggatgctattaaacaatgggaagaaaagcccctgcatacgatgaacgcccatcaaattatggatggtattcagacaatattttatgccgcatgtatttatttcacaaggattcagcttacattgcctgctgcttctatcagtgaaacattatttacaaaattatttcaaggagcagttcgacgtgctggtataacggatacttccgttttcctgcttgggtttgatacgattgctctgcaatcggaaaaggagttgtggggtctttcagaatgggtaaagcaaaataacagcatcaacctttatctgcaaaacagtcctgcaataaagatagcagaagatttcatgtcttcagttatgcctgttggagtttcacaggaagtatggatagaatggaaaaatcgaatcaataagtactttaaagagtttggtcgtaccgcttatgagtttgattttgcgtattccacaccgcaggaaacacttacaccaacttttgaatccgtaaaaacatttgtggaaggaaaaggggaaagtccttttttacgccagaccacgtttgaaaagcgtagaaaacatgcagaagaagagattttacaacacataggtggattgcgtaaaaaactattttttaagttgctccattgggcacaggaaacctctcctatgcgtgaaaatgctatttatttgatgggaatgggacatcctctgattcgttgtatgtttcaggaaatctcagaacgattcatacgaggaggagctatttcacatttagatgatatttattggctcacaaaatcggaattggaggtacttatagagcagttggataaaaacaagtctctatctgatatgaacgggataatacctgttcgaaaagctgaacttaaaaaatacatgggttatgtgtcaccgtccaagttgccagagaaaaacaaaaaaactatatcacaagcaccacagaagcagaaagatgggaaaattgtgttgacgggcattggtaccagtactggtgttgtgacggctccagcttgtgtactgaatagtccagcagattttgaaagctttcaacctggaagtgttttggttgcagttaccacaactccagcatggacaccattattttcatctgcaagtgcgattgtaacggacattggtggtcctcttagccattcaagcattgtcgcacgtgaatatggcatcccagccgttatggctacacacattgccacacgaactattaagagcggacaaatgataacggtggacgggttggcaggtacggtgacgtttgatgagtaaaaagcctattttcgctttgaagctttcgacctttgtgattgcgttagcggaagtagtaatacttaaagttttcagatttcataatactactaatacccaccgaacagcggtaagaaaaaccgtagcttggtgggtattttcttatgcaaaaaaatgagaatgtctcaaaataaaaatttgattagaaaaaatcaattttgagacaattcctttatttgttgatacaataatacacttataataagcaattttatattgttaattggaggagttttgaaacataagtttttcaaagtcttttatttgcaaaggtctagagaacacgtatccttgtaacatatcacagtttatttcttgcaagaaatctttttgaaaactggtctctattctctcagctacagtggtcatttttaactttttagctagttcgattatagatacaattatatttctttcacgttgagaatctaaatcttctgattgaaaaaatgctctatctaattttaatgtatcaacataaatacccttaagcatattgattgaagaatagccacttccaaaatcatcaatagagcatttaaagtcatttttatgaatttcatttattatttcactaaatactttgacatcttcaaatacaattgtttctgtaatctcaatttctataaggtgagaaggaatatcatattttttagctattttatcatatttcttgataaaattcttggatgaaaaatgataatgagacatattgttttaccaatgtcgttacatctgaatatattaaaagatatataggcttatcatcttcccaatctatacattcagctacaacttgcatgtgaaaaatatctccattaatagtttgtggagaaatagaaaaacaaacgcatctcccagatttaaaatcattatgatatttatacacattgttaagataaccttctaaatttatatcatctaatagaaaatttacattatctttgaacatatcaaaatattttttattagcatcaagaagttggaatccaaagtcagttaccttaaacttggcaatgaggcctggaaaattgttgtatagaatatattcaaagcaagatatgtctcatattttagaataatcttattatatgtaaagttaagctattttataagtctttttatccagttatgcatttttattgaccagttagacgtaatatattgaatattaagaaaattggtactatcatataaataaatatatatataaaggaggtttttatatgagtctttttgttggtggatggtcaaaatttagggctgtcgaagaagaagatttaaaagtatttaatgaagctataggaatgctaaaaggggttgattatgaaccacttattgttgctactcaagttgtagcaggaacaaattttaaatttatttgcaatgctacttcagttacaaatcctccacatgattatttagcagagataattgtttttaaacctcttccttgtgatgaacataatgcaacaattacaagtattaatataattaagtaatattaataggaggtggaagatgagactaaatgtaactaaacaaaatactatagaggttgaaaatagtagaaaagaagatgtttattttgtaatagttgataatgttttttttgaacgtcaaggtgatgtatttaatagtatcacgaataataatttaaataattatgatgtaaaaatattaccaactgataatgtttttttagaattaaaaataacatctactaaagatttagaacctgtttttattgtagttgaagatagacaatacaatcatggtagtataatgtttaagccagtattggtatagaatttaagcaaataaaagtgaactattcaagtaggtataggtgaactatttaaactaaaggaaacctattaaaccagtatagttgaactatttaagcaaataaaaataaaatattcaagctggtataggtgtaaaacttaagcagtagtataggaatgtttaaattaatggtacaaatataattaaaaatctatatgtaataaccataggaaaatagtggacatataatataaaaaaacaactgtattacataaaatacaataaaataagcgcattaaataaaataactgtgttggtaaaaattatattatacaacacagttattttaataaacaaagaagaataattattgagtgaaaatgcaaatttattaaaaataaaaaacaaatttaaatatagtctaaaaactttgtaatctacttaagggattaaactttatttaaataaaatatataaccaagggggaaaataaatgccagaaaataacaatcaacttttagaagaaataacactcttattaaatgaaggaaaagtagcaataaataaggctgaaaatcaaaatttaattctaattcttggtgggacaggatgtggcaaaagtactgcaattaactatcttgcaggatgtgtaatgatggaagtagaagatgaagatactggtatatcatatattgattgcttagaccctgtggcagagattggttcaggagctgtttctcaaactttatacccaaacattgtaaatatgagaaaaccaatagaaggaatggatgcaaaattatgtgatactgcaggttttagcgacaataggggagtagcccatgatattagtgcagcagtttcattaggtgaagtatttaaaaattctgcatctatatgtgcagtaattgtattgattaaaaaatagctacgcacactcgtgaatttagtcatgagttagtagctaaaatagtcagcatatagggaaacctatatgtagagataggatagagcctatccaatactacttgaattgctggaaacccctaaagctaaccaaactaaaacataaggatgaaataaacctaagtgtgaaagttacgaaagtagaaaaaattggttagatggtataaggttaaaccctaagtactttaaaatgggcaatcagcaggtaagctccgaataggagaaacttcaacgactattcctcttgagggaagtacactacaagctattggtagtggaagtgggtagaccttagcggataatgccgaaggataagatatagtctgtgcttacatgaaagtgtaagaagttcataagagaactgcataggtagtagcgaacttatgtgaacgacaacctcaaaaatgataaaagttaagacttacggttcttaaatatgttatttaaaattaaatataaaaccttctaaataattgttttaaataattacatttgttaatattatgataggtgattaataaattgttcaccacagtattatacaatatattaaatatgataaaatcattaaaatgtgtatcaaaaaacaattagagtgaggtagtagtagtggaaaaagcttataagtttagaatgtatccaaataaaaaacagcaagagttaattaacaaaacttttggatgttgtagatttgtatataataagtatcttgctaaaaaatagaagtttataaaaatgataaagaaacttttacttataaacagtgtagttctgatttgaccaatttaaaaaaagaattaaagtggcttaaagaacctgacaaattttcactacaaaacgccttaaaagatttagataatgcatataaaaaattctttaaagaaaaagcaggatttcctaaatttaaatcaaagaaaactaatagattttcatataaaactaactttacaaatggaaacattatgtactttagtcaacatataaaactacctaaacttggtatggttaagataagggataaacaagtacctcaagggagaatacttaatgctactatatctaaagaaccaagtggtagatattatgtatcattatgctgtactgatgtagatattgaagcatttgaaaatactaataatcagataggtttagatttaggaattaaagaattttgtatctcaagttgtggagactttatagaaaatcctaagtatcttaagaagtcattaaacaaacttgctaaattacaaagagaattatcgagaaaaacaatcggtagtttaaatagaaataaagcaagattaaaagttgcaagacttcaagaacatatagccaatcaaagaaatgattttctacaaaaactatctactaaattaataaaagagaatgatattatttgcatagaagatttacaagtaaagaatatgattaaaaatcgtaaactatctcgcttaatttctgatgtatcatggtcagaatttattcgtcaattaaaatacaaggctaattggcatggtagacaaattgtaaaggtaggtaaattctttgcaagttcacaaatatgcaataaatgtgggtataaaaacgaggaagtgaaggacttaagtataagagaatggatttgtcctagctgtaatgaaactcacgatagagatataaatgcaagtataaatatattaaaagaaggattaagactaataacaattcaaaataaataacttatgtaagaaccgtaggaactacggggatggcctgtggagaattagtaagacatattttagtatgcaaaattctgtgaagcaggaaccctgtgactttagtcatgggaggttcagaccagaagcagatatattagattctagacttacaaaagtactagacctgtttcaacagttaaatatgtgtcttcataaagacaattttaggggcagtataacttttttcatttcaaaaagtttcttaggaagaacagaaaaacaaatatataatgttataaaaagaaaatatgaacaattatgtgaaaatttagatagtaatatagaggaaaaagcttggttatttgaagaattgctaaaagataatggtaaaaatattcatctttgtaagccacttgaatcagacgagagggaaggcttattaaagcaagtactagaattagatgaagttaaagataagacatcagcattccaatatccaattagtgcagatgcaagattagttttagatacgttgataaaagaaattcaaaacaatatcgtatctagcctagaagattatgttaaggcgtatacagaagattttatcagtattattggaagtataacaatgattcaagaaatagcaaaatatgatgaggttgtaaaagtatttaaaaactggttggaaagtacaacaactcttactatagagagatttatcaacgtattagccaaacaaagtggcttattcttacaagatagttgcatggaattacaaaataagataaaaggaaacttagatataattgatgctttaagtaaatatacagaacatggaactggggaaattttattaccttctgtacatatggaatttattatagaaaaggcaagtaagaagataatggaacaaaacttcattataataagaaagaatttagaaaaagttttagtttcttatgaagtacaaaaacaggtatttacattaccaaatagagaaaaattaatggaagttgcaaataaaaaggattatgtatatagtgtaagtgattttaattcaattttgacaaatgttacagttacacaaaatgaagagttagaagacagtataacaagattaagtgcatatggagaagaaggtaatgagataattagagaatttattggtaaatacattttaaatccatttatagtaaaaacaattaatattaatgataagaaaggtattgaaataagagcattaattccaaacttagtaattagtagtgtattggaatatttcaaaaatagaaaagtagatgacaatgtttctacatttatgttctttgccaaagatactatttatatggatgataaccttggaatggactttgcatcagagaaaaatattattcttgcttgtaacaatcttgatgtaggtagtaatgtaaaaattaatgtaagtggaaagagcggagaacttgtagatagttctatgtatgggaaaaatggtgaagatggtagagatgcaggtaatatttacttatatattaaagaagaaattagaaattatcgtttaacactgattgcaaatggaggaaatggttctaaaggaatagatggtaaaaatggtgaaacaggagattctggaagtaatggagctgatgcaggatatacaagtagtttccatggacagatgtttaaagggtattttgcaaaaggtacaagtggtaaaaaaggtgacaaaggtggagctggtggaaatgccggaagaggtggaaatgctggtaataaaggtaatatttacttcatttcagactcagaggaacaaaaaaatagaataattaatcattgtgatataacagtgaaagatggagaagcaggtccaaatggtagaccaggttcaggtggatatggaggaagtggtggctatcacggatataatacactttcattttctccaagtggtatagataagactgtttactatacaggatattttacaagttgggattataagttagatagtataattaaatatcatatagaatttagtggcggaagttggaatgaaggcaaaacaggaccagcaagagaatacgctgaatatggagatagaggagacgacggaggatttaatgctccaaatactaagttatcaacagctgtttcaaaggtagaagagaatcttattaaagaaaaatatcaaggctattgttccgaaatatagaaagggatggatgtatggcaaataaactttatagtgaaatcgtaaaccttttggaagaaggaagagacgagcttagaaaatatgacttaaaagaaaagtcaattttgttattcttaggtgcttcaggcgttggaaagagtacttgtataaattatttaaaaggttgcgtgatggaagaaaaaacggatgaagagactggacaaatatatataactgcaaaagattcagctgtcgaaattggaaatggtgtatattctaagactttatgtccagaagttgtagatattgcaaatagaaatttttcattatgtgattgcccaggtttttttgataaccgtggagcagagtatatgattgctggtgctatgcttgtaagggaaactatttctacatcttcaaaggtgaaagggatggtagttattttagactatcaatccttactggactctagacatacattattgatagaaacaggcaaaaatttgaaagatatgcttggtgattatgcaaagtataaagaaaatttcttctttcttatcaataaaatacctaaaacactaatcggtaatgtaacagaagaaaaaataaggaatatattggaaaaagcaaaagaagacctagatagtcaagagaaagattacgacggttgtaaggaattagtgtacttattaaatgtagcattatcagatggtgtatctattaaattatgtaatccactagatagacagccagaaaagttgttggatgaaatgaaaaatctacctgaaacatttgaaaaaacagatttgggattgatgcttactgcttcttgtaaaatagaaatacaaaaagccgttgatgtaacctataaagacctagaaaaacttttagttccttatatagaaagtgtcaaaaaaggtatggaagattctatttccattctatcttctataaatagtctaaaggataaaaagactcaattagataagatgtatacagatttatgtagtaggactaataatatgaaagagcttatggagtttgtacaagaactttcatatggtgatggcgtacagaaagtgaatatattagaagaaacacgtcttcttttagagttaaatagctactgtagtgagactcatattgttggtctaagtgagttgttaaaatcattgctaaaaaatactttagaagatacattaaaagatatcaaatattggatagcagaagaagaatatagggaagaagaagccaaaaagcttgaagatgcagagtataggatagagaagattcaaagttgtacatatataaaatcatatgagaaagaaaatgtactttctatatatattcctatacctaaagtgaatttatcggatttgactaaaataatatctggttatcaacttaatattttgtcatctatatatatgtatggagattgtgagttgaaaattgactgtaatatggagaaagaagtcttctcaggtaagaatattgtactacttacagaaaaattatgtataccagaagggatttattcaatcaacgtatctggtaaggatgcagaaaaattggttggagaaggttctatttacgacggaatgaatggaagaaatggcaataatgcaggtacttcaggtgatattttattatcttttaaagaaatagaaaaaagaggagaacttaaactttacgtagatggtggacgtggtggaaatggacaagatggaaaaagaggagatacagggataactggagaagctggggaaaatgctaaaataggttctaaaaaagagtcaaaagaatttgctaaggttaaaggtacaaaatactatgtggtaaaagcagaaaaaggaaaacaaggtggaactggaggcacaggaggtaatggtggaaatgcaggtcttgggagcaagtctggacaggtttatctccttggaaaagcttctttattaaaaggtgctataagtaaaaaagatggaaatcatggtctagcaggaaaaggaggctctggaggagctggtggtgcaggaggtcttggtggaattagaggtatatatgaagaaacaataagatatataggtacctctgctccaatagatgacagtgatagaaattactattattttgatagatatgtgtttaatcatgcttcaaatgagaaccaagtagcagatgatggagagaaattaaatgctctttatgaaaaacataaggactggacaattagcaaacgtgaagattcaggtttagtcggagcagagggaaaagacggtcgctctggagatgcattaaaagaaaaggaattgttaaagcaggagtattctttgtcaatagataccttcttctatgaatttttcgagagatttggtttttctggaattaaaggttatagaaatcttagactgttgtgtgcagtgggaattttagaagctgatattttagaactttcacatatttatgaaatttttcatgcagttgagaaaatagagatgcaattaaatagagaaatacttcagaagtactatagttttgagaagaaaaataaagcagtgctttctctggatgatatgaatataaagaaagaattttataaggaggcaaaggaaatctatgaataccttataaataaattgatgcagtctgatagaatagaatcttttataggagaaaagaagaattttagcgaatggagtatgattttatttgcacttgaacaaaaaacagcattctatgtgcagatgattgaagaaagtgaaattggaggaaatcgtgttacagatattcgttctttgacagattatctggacaagaccttaagagaattggaacaaggaaagaaagatgagttaaaagaaggatatttcaatacttataaggaaagtatcctaactcaaattgaatctggaaatcaacaaatagaagttttaaaagatgaacttgagaataaaatgctttctgttaatgcaaagatgaacctgttgattcaagaaattataaagatgaaagaagaggagcaagaagacatagaggaactaaaaaagaaacaggcaaaacttgaggaacaaatgaaaacacagttaattctttctggaatacaaagcgcattgagtttactgactgcatttagtggtgttggtcaagcttgtctaggggcatttgacagtgcaaaatctttgaaggaaaatctttcagctaaagaagaggaataccaatggactaacaggatggttgatttttcagattttaaattggattctgatggtatgagatttgtacttggagaacagctaagtgaagatagaaaaaatgctttagataaaatgacttataatttggcaggtgttgatgaagaaagaagaactaaatttgaccaaattaaggagattatagttaagtctatagatgatgataactatgcagaaaaagctgacgatattcaaagagcaaaagaggggttaagtgaaagcgagtataaggaaatttacacaaaaatccagaaaaaagaaataggtatgttggaggcaaattacaataataaacagcaaaaagataagttagctgcactagagaaaagtaaacaagctattgaaagacagcaaaagacatctaaaattaaaaatgcattgagtattggaagttctgcttgttctcttataaatactgcgattagtggtgttaataattgtcttaatgtaaaatctagttttgagagtaaaatagaggtagttaaagaggcaattaaagataaagaaaataatattaagaaattagatgaattgaatactcaaatggtggaatttaaagataaaactttgaaagaatctgttataccatttgtagaaaaattcgatagtacagttaaaaatcaagatatttttgaaaatgagataagtaaattaaagatgaaggaagttttaactgaattaagcacaaagtttggaagcttaaaaatggaaaattcagaggagatttctataatatttaaaaaagtacaggatatgatggaaactcaaattatcattactgataagattgataagaaaaaagataatcttgcaatgggagaattgatttatcaaatgtcaggtagtggtaatcagatgaatgaatatcagaaaaaacttatccatcaaattgaattaaatcaggttagatatttgtgtcaggttgaggcagcagcttttcaactatggacgtttccatttggaagcaatatagtaaatatcttaaatagatgccatgtaggtattacagaagatgaaaacgaggttataaatcaggcgaaagagcaaaatagacagattagagagtttcttgaccaagatgcttaccaatggcaaaaaacggataaccatattttgaaggtagcattaacaggcagtttagatgggaaatcacgtgtgggatttgaaaatacatattctctatatgattgtaatgaagaagaagtgaaaaagcttttgacaggagatgaaattagttttgaagttccattaaataaaaactttgatgccataaaatatgtaaccatgtatgcaaatatcccgaaccttagacgaaatattttagaggatagtttaaaagtaaaggtgcatattcatttatatgatagtggatacttctccctatatgatgataaaaaagatgtctattatcaatatgtatttccacaaaactatatagatattacacatggtcttgatgttaaatacaatgattcagattcaataaactcaatatggtcttcagtagaagataaaggaattgaaaagttcaaaaatgcaggattaaactctggtagaagtccatattctatggctaagatttctttgaaggcacattttaataagaagctttcttatgattcacttacaaatgagcagaagaagaaactagaatcatactttgataaacctagtaagtatgcatggagcgagagtatagatatattgaagagtctagggtatattgatttgaagggaattttgtcaaagagttggtatgaaatcaagaaagatatagatagtgatggggagattatgaagcatttttctatattacaagttgatttattggaaagaattatttatgagcagactagtatactaaaggaaaatatacctaatttgacaattgaattggtaggctgtggtatttatgtagagtctgaatttaattatctaaagcaaaatgatttaaaatgctatgaagaaagattggttgaaaatacaattatttgttgaaaatataattaatatataagttttaaagaaatttacaaaaggggatgtttcaaaatgaaaatttgaatcatctcctttttgtaaaaaatagaaataagttgagtttaaaatttgtaaaatatgttttatataattttgattagaaaaaagctccttttaagacagtttctttttaaaagatgaattataaattttttatatacatatgttttatataatggggattaatagtagttataagtattggtgttttccaataaatttgtcatactgtttaaacttattccaacagtagatgcgttgtgtaaaaaggcagatgtacttggtctaacaaatccacttacgccaagtaaaatcagacctaaattaaagccgataataaacttagaacttaaatcaactcttttcataagcttattactaatctgctttaaaacgattaaattattcaaattatctgctgatatggtaatatctgaaatctctcttgctatttcagcaccttcactcattgcaattccgacatctgattctgaaatagcaggagaatcattgattccatcaccaatcataattactttgcgaccttttagtttttcacttttaacaaaattggctttgtcttctggtaagacttctgaataatattcatcaacaccaactttacttgctatagatttagctgttttttcgctatctccagtcatcatcacaatcttttttattccatattctcttaaatttgaaattacatattttgcttcttttcgtaaagggtcatttatgcaaataactgctgataatttacccgatattgccataaataggtgagaatactcatctgatagattgttgtacttatcctcctcaccgtctgggatagtacacttctcatcttcaaatacaaaatgtttgctacctattacaacctttttatcatcgacctttgttgaaatgccatgagcaataatatattctacctctgtatgcatttctttgtgactaagcccttgtttttcagcttcataaactactgcatttgctatggagtgtgggaagtgttcttctaagcaagctgcaagtcttaacatatccttcttattataattttggaatgtaattatatctgaaacagttggttgagcttttgttaatgtgcctgtcttatcaaatacaatagtatctgcacatgcaacaccttcaaggaattttccaccttttacagcaatgctgtgattgttacattctctcatggctgatagtactgaaatagggatagagagttttaatgcacaagagaaatctaccatcaatatagagagtgattttatagggtttctagtaattgcataggttaatatacttcctaaaaagctgtatggaactaatgtatctgctagatgttcaaatttactctctacagaagattttagtttttcagattcttcaatcatagttactattttctggaatctagtagtaccagctttttccttgacgcacataacaatattgccttgctctattccagttccagcatatatgtaagagccttcttttttgttaactgcaagggattcacctgtaagtgatgcctgattgaccattgcttctcctgatactataactccatccaatggaatcatatttcccatagttacactgactaaatctccttcctttatctctgaaattggaactagtatttcagtggcatctttttttaaccatactttttcaatgtttagtgacatactttgagccaagtcgtctatagatttttttctagtccattcttctaataactcaccgataccaagaagaaacataactgaaccagccgtattgatatcttttctaaaaatagaaatacctatagcagtggcatctaaaacagaaatttctatttttttatttagtagggaagagagaccttttttaaaatattttatagaatgaagtccaattaaaaaaaatcttaaggactttggaaaaaatattttggagatacttttgactagcagtttatttgctaatttgtctctataataattgtttaattccctgctggtatgttcaggaactaggttttctattttgctattgttaaaactgaatttagtgatttctcttattatgtattctctttcaccagtgtaataaatgactgcatcaccagttctatcgtaaacttttgctttggtaataccatttatagaagttaaataatataagagagtatcggactgcttgttgtttaatttgccaagttgtaagtcaaagcgtatacgacctcttatttcgtgttttatataaaaattcaatttacttcctcctgatattattaatcataataatcattaaatttattctgttgtacaagtattatttttttcttcaattacgttatctttgatttcttcacatttaatgttattagaattagtatcttctacagtttttatagtttcagttttaagaacttcttgttcgcatttaagagtatcttgtacaacgtttaccttagatgtagataagtcttcttgctcgttgatttcttttgcttcagctaaaatatcttctacattttcttgaattttcgtagttgtttcaagaacagaatctttaactttcaatgctcctgctgttgcacgagtgcaagttttttttacacagtcacttgaaagtatcttaacacctacagtaccaaaaagtactcctcctaaaaatattcctgtttttttcatttttaaaatattcattttacattatcctttcatttagttagattttgtttatacttatgtataaggtaacaaatgttaaaaatagagtatgttttacaaaattagtttagagagtttagtaattttatttgatttatattagtaaatttacatgaattttacatgtgtagtttatatagttgaaataatttttatatagcttatatatgcagtttatatatctagtttatatatctagcttatgtatgtaatttatatatgtagtttatatagttgaaataattcttatatagcttatatatgcaatttatatatctagcttatgtatgtaatttatatatctagcttatatagttgaggtaatactttatatagcttatataatttatataaatttataaccgaatactacacagtttatacataacatattgtttgagcttatctagttcatataaatttataacttatataaattttttgtactttgtattttagaaagttcttgatatttagtccaaaaactttaaaatacagtaaaagtaataattgttattaatagatttgtaaaatcatatgacatttattaccatttatgcaattaagtatagcatgtgtaaatggtattttcaacagaaaatgataatttatatcaattaatttagttgatttgtaatagagcatcaaaaagtatacttatttatatatgggaatgaaaggcaaagttttagttttttcaattaaagtgcgttagatatattattataaatgaacattattttaagtataataatgattaggagggagtgtttatgatgtataaatgaataacaatatagtttatgattgtaaatattatgtaaatataaaagttacttaaatggttttaggaaattgatattattgtgtctgggagattgtacttacttcaaaaagaggaggttatgacaagaaatgtgttgtttgacatttatacaagcagatattagaatgaaagaaagttaatttatatttctttgttttaagctaagaaggcgagctaggcaatttaaaatatattgaatggagaaaaactatgaataaaaacaacaatttagttattatatgtatgtttataggcatgatacttggaatggctataggttgtgctataggtatttctaaaggaaatgtgggtatcacaatgtgttatggtctaatttttggaatgataattggcatatgtatagggactgttatcaaaaattctaataaaaaagaataaatgaattttgatttactaggatgtttagttatgatttatttatgataaaactttttaattatctgtaaaaagtagaataagacatactaaataagatatactaatagatattttttatattatttttttaatatggaaagaatggaatttatatacactatatttaaatcacaaaaaataaaagttaattttgtttaggtggagatttttttgctcttatatattgaataatatcaagtaagtctgcatcttctaaaatacgatacttaatccaacctccattattgccacaagtataacgagtgacccagagttctttagcttttggtgtcaaagataccaacgttttttctactgctggaacttgcttgtcacctatctgaatcagaacagtaaatgcacctttttcaaaaaaagcataaaataaatgaaaagatttatggctatatttgtaaccccaaccataattgtttccaaaaggaaatcgaagttctcttgataaattatattgagtttccaagtaagtttccaacttacacaatcgtgcatatccatctttacctatatattctattatttgagacaaacagggtttattgcttttatcaagcatacgttcatacattataatttacctccatttttacttttaattatagcaaagtaattatgacaacagtatgtcaagtttttatgtcttattatactaacatgtaaaaatataaagtaattatttttagctaatagaaaaatatgatatttatatatattggaaaaaaatgtaaaataatgataaaatatagtttataatacaaaagtataattacattataattatatgtgtttagttggatttgtgtatttaaataatgtataatttatgctgattactgctaaaaaagcataataatattgtattgtaaggttttataaacttctaattgaaaggggataattcaaatggataagagatatttagaatccgatgtatttgaagcttttcaagaaagactttcttatctttttaatgaatttgattatatctatgtatcttttagtggaggaaaagatagtggcttactgctaaatttagttttggattataagagaaagaataatataagttccaaaataggagtatttcatcaagattttgaggctcaatatagtttgactactgaatatgttgaaaaagtatttgaagagaatattgaagatattgaaccatattgggtgtgtttaccaatggctacaagaactgctgtaggaaattatgaaatgtattggtatccatgggatgatgagaaagaagaattatgggtaagagaaatgccagtcaaagaatacataataaatcaaaaaaataatccttttacttattataagtataaaatgagacaagaaagtttggcaaagcaatttggtagatggattagagatatacatgaaggtgcaaaagttgtttgcttattaggaacacgagcagcagaatctctacaacgttattgttctattgtgaataaacagcatggatataaaggaaagtgctggataactaaggaatttaaaaatgtctggacggcatctcctatatatgattgggaaatagaagatatatggttagcccactataaatttgattatgactataataaaatttatgacttattctataaagctggagtagctccaagaaaaatgagagtggcatcaccttttaatgattcagcaaaagagagtttaaatttatacagaatattggacccagatgtatgggtgaaattggttgctagagtacaaggagttaattttacttctatttatggaaaaacaaaagctatgggatatcgtagtgttaaattgccatatggacacacatggaaaagtttcacatattttttgcttgataccttacctgaaaatataaggaatagctatattaaaaaattttcaacatctattgagttttggcagaatacaggtggtggtttgtcagaaatagttatacgtgaattgttgagaaaaggttataaaatagaattaaatggagtttcaaatcatacaaaagataaaaagagtagagtcatatttttggatgatatacctgatgatacggatgatattaaatttaccaaagatataccaagttggaaaagaatgtgttattgtattttaaaaaatgaccatatgtgtagatttatgggatttggtcctacaaaagaacagagaattagaacggaatatattaagaagaaatatgaaaaaattcattagataggagttaagatgctatggaatataaaagtcctgtatatggaatcatcgcagtgccaatcgaaaagatagaatctaacgactataatccaaatgcagtagccccaccagaaatgcagttgttgtataaaagtataaaagaagatgggtatacaatgccaattgtctgttattataatgaggaaaaggataagtatattattgtagatggttttcatagatatagagtaatgcttgaaaataaggatatatatgatagagaaaacggacttcttcctgtttcagtaattgataaatctcttgatgaaagaatggcaagtactattcgacacaatcgtgcaagaggttctcataatgtggatttaatgagtaaaattataactgaactttgtgaaattggaaaatctgatgaatggatatcaaagcacctgggtatggaagttgatgaaattcttagattgaagcaaataactggattagcttatttatttaaagataaagagtttggtaatgcatggattccctttggctctgatatagaagaagaaaattaaagagatttattaaaagaaaaagatatattaaaaagagaaaatttaaaatatatattgaaaataaagagctttaatattatatataagcacagaaaaaagagtaggaaaaatatcctattctttttttatttttataattatacttttagaataaataaaactatataaattaatgtattttaatataaatttatttgttaaaaatagtattaaattgtatatttatatcgtttttaataaaaaataatcacattttatttaaaaatgaataatatatagtaaatagtaattaagttataaaaaattgtataaactctatattatttatttaaaatagatatttatgaaagattaattaggaaaatttttataggtaaaataagaacaaaaaaagatacttatttaattatttaatcttattaaagacctattaaaactactgactataatatagaacaagtatacaatttttaaaaataatgctattttaaaattctaaaaattaaggaggataattaatgggatatttaaaagaggataaacaagactattgttgtgaatttgctagaccatacatcaatcgtcaaatttatgatgacacatacaatccaaaaacagcattaaaaagaggtactttatttcctgaattagatttaatagagtcaaataactataatgattggctatattcaaatcctaaaaatagagttagagctaaaaaagggggtaacatgtactaatgtcattaaatagaagagaacttttagagagaatttcagaatatcaatttgcctgtatagaattaaatttatatttagataacaatccaagggataagaaagctcttgatttatacaatagatactgcgataaatttacacaagctgtgtgtgattatgaatctaaatatggagcattaactaattttggatatgaatcaagtgaatatccttggtcatggatatctgaaccttggccatgggacaaatcattttataaataaaattattaagttttaaaattagaattattattaaatatatattaaggaggagtaagataatatgtggatttatcaaaaaacactggaacatccagttaacataagacaagcagaccctagaatggcaaaatatatcatgactcagttgggaggacctaatggtgagttggcagctgcaactagatatcttcaacaaagatatactatgccaactggaaaatctcgcgcacttttaactgatataggtacagaggaaatggcccatgttgagataatttcttcagtgttatatcaattaataggcagttgtactccggaagagcttaaggctgctggacttggtagtaattatgctaattttggacatggtcttcaaccagtagattctaatggagtaaactttactacaagttatattaatgtctttggcgattcggtaactgatttacatgaggatatggctgctgaacaaaaagcattggctacgtactatcaattaataaatttaactgatgaccctgatttgaaagatatattgagatttttgggtgagagggaagtagttcactatcaaagatttggtgaagcattaatggatgtttatgagtttacagagtgtaagcatcagttctaattaagtattaaaagtgaatagagagtaagcatcaattttaatgaagtattaaaaatgaaaagagaataagcatcatttttaatgaagtatcaaaaataaaaagagtgtaaatattagctctgataaactatcaaaataagaggtaaaggttttagttgatttcttttatctcttattttttattgattaaacagattactttgctatttaaatatattattttagcaaaaaaagtccaatcaaaagttcaaagtattaccatagttcaaagcattgccgttgttagtaagttttttacaatattttttatttactctttggataatcaaaagaaataaaaaatcatatctctttttttatatttctgtacacttttggagaatatcccgttttttctttaaaacatttactaaaatagattacttaatgaaaaacaacttttatatcaatatcacttattagctcatctgtaccctttagaaattcagttgcttttaataagcgaaactcagtaaaatatttcttgatgttatatcgatatttttttgtctatttagtgataaaattataatatacacttctataaaagttaatacagtaggaagcttaaatgtatgaattttatatccatcaaagggaaaggaaaaaaaggatgaacagattcaggtaaatataaaactaatatgatatgaggatagatattataacgaaagtgtagtcagaaggaaattatattagtatgtttttacataatggcagatagaaaagaagtgtctaatgatttgagtgaagttttcagaatataaggaggaattgtatgcaatatattagctattaccatagtccaattggaaatattcttttagcatcagataatgttgggttaactggtctttggtttgagaatcaaaagtattatgcttataatcttgaccaagaacatcaagaaaaagaattgccaattttcgagcagacaaagaaatggctagatatttatttttcgggagaagagcccaattttacaccatcactccatatggtaggtactcctttccagactacagtgtggaaaattttacaacaaataccatatggtaaaacaatcacttatggagaaattgcacataaagttgctcaacaaaaaggaatatctaaaatgtcagcacaagcaatcggtggtgcagtagggcataatggaatctctattattgttccatgtcatcgtgttgtaggaacaaatgggagtttgacagggtatgctggtggaattgatagaaaaataaaattgttatctttagaaaaagtatctgtgcaacattattttatcccaaagaaagggagtgcattataaagccattaaatttagaaattcttaatcatttatttgatatataaacatctaattttgaaagcaataacttgcaattttaaaaaactattctttaaactatatgttatacaaccttattcctagtaaacattatataactttagaggtagttttagagcttgtattttggaagtttattttcttttttcgtgtgagtagttatatgtttagatgcagtaatttatatgctacaaacaggaaaacaaggagcagacaaaaaatacttagataatatgttctttgtgaaaggttatgttgaagaacttctatttttagataacagttatgatattgtattttcatgtattgtatttcatcattgtacaaatgttcaaaatatattttgtatattttggaaatggtaagagtgttaaatataaggggaaaatttataatgattgatacttaagctactcattaagtattaagaaccatacaagataaggttgaaatttatatgcttcgttttatgtaaaaaatgtaagtgagttagaaataaaagaattatttataaaaaatagattaagtattggaaaatatgaaaaatagatgttgaacaaaacttagtcgattggttaaatttaaccaaacacttaaagtatcaaaagaaaaaattattactcttaagcaagaagatataaatggaaaaatgaaaacaagattttatccttttataagtgataaggggatatgttttaatcaaagatggacttttattttaggctgaaaaattatataactatattatagaatataagggagatacacaactttttagtgttcaatctcccttattttttattattatatcaagactcatttagtcgtgttaattttaggataaaatgagtattttttaataaattatttataagtaaagtgtgttgtcggataatcagtatttctgtataaaatttggtataactttaaagaagtatgtgaaattttcaggtattttttactatggtatattatttaactgattttaatttagcaatatcattccaattcttagatgtgactatctctatattgtttaaatcatttttaatatctgatgtatcttctactaatgaagaggtatgtttaatcactgtatctaatgtatttctgttaatttttacatctgacttaatttctgtaacatcactctgaattgtatcaagtctactactagtttcaacttgtccagtttttaagtctttaatatcaggttccatattgtctaatctactattgacttctttaatttcaccttgcatatcagtaatactgtcttgcatactattaatagtgccatccatactactgatactgccttgcatatcgctaatagtaccttcgatatcattgatattgctttgcatatcgctaatagtgccttcgataccattgatactgccttgcatatcgctaatagtgccttcgataccattgatactgccttgcatatcgctaatagtaccttgcatatcgctaatagtaccttgcatatagttaatattaccctgcatatagttaatattaccctgcatgccattaacagtaccttcgataccactgatactaccttgcatattactaatattaccttgtatttcctgtaataattctaatattttttcatccatcactatcacactcctgttttattattataacataatttaggtgttatattccacaaacgctatgtcatatttaatttttaatcatataattatctgctattcaaaacatggttaaatatatctatattgagaacttttttattaatgaatcttgtgtattgtctaagtgtctaagatactataataagtgtttttgaggcatatgtggttatatttgtatttaaaactgctggtaatatcataattgattacttgtgtttgaatattttgattagtagcttcctttttatttctttttattcttagttttaaactttcatatttccttgaaaatttattggcaatgaaagtgcatgaattttttagctattttttatgttacaatatgaatatataacaattcgacaaattggatttttgaaaggagtaaaatgttatgaaaatgccaaaagagagtattgatacgattatgtttgctccttgtggaatgaattgtatggtttgctataagcattgttatcacaaaaagccatgtgctggttgtttgaacagcgatacaggaaagccagaacactgccgtaagtgtaaaataaaggattgtgtctgtcaaaaagggttgttttattgttttgaatgtttcaattttccttgtaaactcataaaaaatcttgaaaaaagttataacaagagatatcaagcaagccttatggaaaatagtaaatttgttcagcagtacggtttagagaagtttatgcaaaagcagaaggagagatatacttgttctaaatgtggaggaattatatctattcatgatagggaatgtagcgagtgtcaagaaaaagtgaaatagctagatcactgtttatcaagatagaaaaaattgtaatatatatataaaggtggattatattgaggtggtatatagtgataggtttaaaatgtggtatggttaaattattggaacatcagatgatatgggataaaagtgcaaaagatgtcattatattattgaaaagtatatgggataagactgccattgatattcaacacattggaagcacttctattcccagtattagcgcaaagcctattattgatattgttgtaggtgttgcttctttagaggaagctaaattatacctcgaaaggttagagcaatgtggaatcgtttttcgaggtcaggatgtaccaaaacaattactttttgctatgggagattttgagaaaaatactcgtactcaccatattcatgttgttgaatggaatagtgtcgcatggaataattatatcaattttcgagattatctaaatacttttacagacaaagcaaaactctatgatagtcataaacaaaaattagcattacagtttgaggacaatcgtaaaatctatacacagagaaagcaagaactaataaatattttgctggaataagcacgactgtggagaataaatacctaaaagaataaatttacatttattgagaaattgaacaattattttcttatatttagtaaataaaaatctatttttgttgattaaaaaatatctgtacacactcatgactttagtcattggaggttcagattgtgtagaattattggatgaaggaggaacagtatgaaaaaggatacatctcatattatcaaacgggcagagcactttcaggtaattttgattggtgaaggacttatggttggggctgtggctggtttgattgtgcttttatacaggatacttttagggcaggctggtacttggcttagccaaattttaaaatttgtagaaggttctacaataaaaataatagcttggtttgcagtacttgcagtacttgcgtggattgtatcaaagttggtggactgggagccaatgatttctggaagtggtatccctcagcttgagggggaaatgacagggaaaataaaacaagtatggtggcgagtgttgcccacaaaatttattggaggattcttatcacttatgggtggtcttgctttgggaagggaaggtccttccattcagcttggtgctatggcaggtaaaggtatttctagagctcttgaccgagggaagacagaggaaaaattcctgttaacctgtggggcaagtgctggattatcagcagcctttcatgcaccactggcaggtgttatgttttcacttgaagaagtccataaaaacttttcagtatctgttttaatttctgtgatgacagcatctttgacagcagactatatttcagccaatttcctaggaatggagtctgtattccagtttgattaaaaaatagctacgcacacttgtgactttagtcatgagttagtagctaaaatagtcagcatatagggaaacctatatgtagagataggatagaacctatccaatactacttgaattgctggaaacccctaaagctaaccaaactaaaacataaggatgaaataaacctaagtgtgaaagttacgaaagtagaaaaaattggttagatggtataaggttaaatcctaagtactttaaaatgggcaatcagcaggtaaactccgaataggagaaacttcaacgactattcctcttgagggaagtacactacaagctattggtagtggaagtgggtagaccttagcggataatgccgaaggataagatatagtctgtgcttacatgaaagtgtaagaagttcataagagaactgcataggtagtagcgaacttatgtgaacgacaacctcaaaaatgataaaagttaagacttacggttcttaaatatgttatttaaaattaaatataaaaccttctaaataattgttttaaataattacatttgttaatattatgataggtgattaataaattgttcaccacagcattatataatatattaaatatgataaaatcattaaaaagtgtatcaaaaaacaattaaagtgaggtaatagcagtggaaaaagcttataagtttagaatgtatccaaataaaaaacagcaagagttaattaacaaaacttttggatgttgtagatttgtatataataagtatcttgctaaaagaatagaagtttataaaaacgataaagaaacttttacttataaacagtgtagttctgatttgaccaatttaaaaaaagaattaaagtggcttaaagaacctgacaaattttcactacaaaacgccttaaaagatttagataatgcatataaaaaattctttaaagaaaaagcaggatttcctaaatttaaatcaaagaaaattaatagattttcatataaaactaactttacaaatggaaatatcgtgtattgtggtcaacatataaaactacctaaacttggtatggttaagataagggataaacaagtacctcaaggtagaatacttaatgctactatatctaaagaaccaagtggtagatattatgtatcattatgttgtactgatgtagatattgaagcatttgaaaatactaataatcagataggtttagatttaggaattaaagaattttgtatctcaagttgtggagaatttatagaaaatcctaagtatcttaagaagtcattaaacaaacttgctaaattacaaagagaattatcgagaaagacaatcggtagtttaaatagaaataaagcaagattaaaagctgcaagacttcaagaacatatagctaatcaaagaaatgattttctacaaaaactatctactaaattaataaaagagaatgatattatttgcatagaagatttacaagtaaagaatatgattaaaaatcgtaaactatctcgctcaatttcagatgtatcatggtcagagtttattcgtcaattagaatacaaggctaattggtatggtagacaaattgtaaaggtaggtaaattctttgcaagttcacaaatatgcaataaatgtgggtataaaaacgaggaagtgaagaacttaaatataagagaatggatttgtcctagttgtaatgaaactcacgatagagatataaatgcaagtataaatatattaaaagaaggattaagactaataacaattcaaaataaataacttatgtaagaaccgtaggaactacggggatagcctgtggagaattagtaagacatattttagtatgcaaaattctatgaagcaggaaccctgtgactttagtcatgggaggttcagattggaaatgtgttgccacaagattattatggattaatagtgattttaggtgttattcttggagttatgggggcattttacaactggtttactctatatgtgcagtctttatacaagaagattcctaaaattgctacctttggaaaactgttgattccatttataatggctggtattcttgggattgttatgcctgatgttctggggagtggacacaatttagttgaagaacttacaagtcatgaatatatttttggaatggttgttttgatttttgttatacgttttatattttcggctgttagttttgggtcaggtgcaccagggggaatattttttccattgcttgttttaggagcatttataggtggaatatttggtatggtaggtgttaaagtttttggaatgaatcccgattatgtaaataactttgtgcttttggctatggcaggatattttacagctattgtgcgtgcccctttgactggtatcatattaatttttgaaatgacaggttctgttagtcaaatgctttcactatcagtaatttcaattgtggcatatattgtggctacacttatgaagtctaaacctatttatgaaagtcttcttgagaggttacttgaaaaaaatggagaacctgtacataaagagaggggcgaaaagatactagaccagttctctgttatgtttggctctcctgttgcgaacaaggcaattcaggatgtacagtggcctgaaaattgtcttttggtagcaattcaaagaggtggagaagaaattattcctagaggtaagacaattcttagaccaagtgatgtaattgtgactatgacagatgagagagatagtggtgctgtgtatgataagatggaaaatttgtgtaaagaacatacgtcacatattttttagggataatgatgaatgtttaataatgatagaatatttaatgaagatttgattaaaaaattggtaatttgaaagagagttaaggaattaatagaaaatgaaaatgtgatatcttagatgtaaaagagtttgaagaaaataattgtatatatttgttaatgagattatatggactaatggtatatttatactgtgctaaaagttgcactattgtatgaggaatgggaataaagggtttgaaaaaataggtagaagatttttcagatattcttattgggatattttaattaatatattttaattgcgatattttgggaagaatagaatttatttataaatgaaaataattaaaaggggttaaggttgtattagccccttttgcttatagagtttggaaatggtatcttgatagcagttgttttatgcttattatattttattacatattttaaaattaaccttatcactcctaaatcattattctatcaacttttaaaacactttcaagacaatcacctattgaaaacaaagttaattaaaaacctacatatcagtttagtattcgtgtagatgattatataaatataaaagtataagaaaggtgagtatctgtggttagttcatttttaaatgatatctttagaacaattttagtaagttgtatttttatagttattttattagtctttagaataactttatttaagactttcagtaaaaaatttaattactatatatggcttattgtgattattaagctatcattaccatttatgaattatacttttatatttaatgagtcaaaatataatggtaatattaataagataagtttaggcaattttaatagtatttctattgtatatagtactgttttagtctctgtttggattgctattacgatattttatttagtttatactttattgaaatatattaagcttaaaaatatgataaatgatttgtcttatgatgttgaggatgataagataaaaaatctttatgaaaatttattaaaagagcttaagataaataaaaaaatacggcttaaatattcatatgaagttgaaagtccagtattttttaattcgtgtgtcattttaccaccatgtgattatacattaaaagagttaaactggatatttaggcatgagttgatgcattttaagagtaaagacctttacattaagtatttggtgatatttttaaaatgtgtttattggtttaatccttttgtgtatataatggagaagtttatagatttggattgtgaattttattgtgatgaaagagttttgaagaattgtacgatagaagagaagcaggattatgcattgacaataattagtgcaatgagaaaaggttcaaatagttcaaataaatttgtggctggattacataaggagtcagatattaaaaaaagagtgtttagtatgtttaatgaaaagtacagaaatggtattttgatagcagttattttatgtttattatcttctattacatattttgaaattgatttaattactactaaatcaatattttatccactttcaaaacaaacacctattgaaaatagaactaattcaaaacctacatatcagattaatgtttatatagataattaaaaaatacaaagtttaacaagagattaatataaataattttaataagtatctttcacatatgttaaatttactttaattatattaaagccaatgaattattctttagaagctccaatgccagtaaatacaggtaaagaaaaatcttttactacaattgtaaattaaaaaatattctaatatttaaagaaatgcaaaagtgtaagaagggtaaaaatctgttataatacattaaaaactaaatttagaaaaatttacataattagaaaaatgatttgataaaaaataaagttaaatattaactaagtaaatttgaaaaagaaaaaatataaagtacaaatttaaaaggaggtaactaatgaaaaagaagttggaagatatgactttagaggagttatggaacttgtttcctatatttttgactactcacaaagaatgttggaaaaattggtttaaagaagaacaatatagactaactggaatattgccaatgcaaaaaattgttagaataagtcatattggaagtacttctgtgagtacgatttatgccaagtccattgttgacatactgattgagataattcctgattataatatgaaagatattaaagatttgattgagtcgaatggatatatttgtatgtctgagagcagtagtaggctttcacttaataaagggtatacagtagatgggtttgaagaacgcgtttttcatttgcatataaggtatgtaggtgataatgatgagttgttttttagagattacttaattgaccacccagatgttgcaaaggagtatgaaaaacttaagttggacctttggaagaagtatgagcataatcgtgatgcttatacagatagtaaactagattttgttagggagtttactgaaaaggcaaaggtgttgtattctaatagatataattagaaataggtacaattagatatttatcttatatatcgtattatattttttaagaaagtaattaatagaaaaaggggttgtttcaaaatggagagataaatccctttttcattgttgaaatgataaaaatatatttgatttcatgtaaaaaagagtgcctcatcaactaaaaagtttattttgagacacacacatttttattaaggtaaataaaaatatcacatttgattaaattttaagttaatgaatatatgtgtaaatatttaattataagttattataattttacatagtataaaacaatctaatttgtattatataagataatctaattttagactaaaataatctaatataaagaaatagagaaaattcattctcagtataagagatatccaattttccattgtacttattaacaatttctctaatattctcaataccatatccgtgagaattactatcttttttatctgaaataaatagttcttgttttctattgataggatttaccttgttgtttgtcaataaatagctaaaatactccttctcacaacgtgcctttaataccacttttctatttgacaaatcaggaattttcaaagatgcttctatagcgttatctaaagaatttgaaaaaatagtacataaatctataggttctatacccaagtgattgtctatatctatattaaagtgcacatcaacaccattttcttccaaacttgtatgacgaagatttaaaattgagttaagagcttggtttttgcaaaattgtttgccactaagagtacctatacctatttttaactgattaaaatactttttagctccagcaatatcttcaatttctaaatacgattcaatcatttgaaagtgattattcatatcatgtcgcattttgcgtatttgaatttgttgattttctagtaagttatagtatttttcttttaggtgatttgcttgtttttctatcttcatctttacattttcaatcaatggctgtaaaagaagtatcacaccgatatttgccagaattgctgacaagatgattagataagtgccataaggtaagttgcctaagataatattcttattactacccatagggattaaattagtaggtggcagaataatagcaattaatattgataaaaatgaagatatacataccatatcaataaaaatccatattttatttgataagtattgttttatattgaccaatctattctttaggaaaatatgtattaaaaaccaaaataataatttaattagagcagaaattatctggactattgaaagtattaaaatatattcttttgagtgtataagttcctcatatatagggttgtttataaaaagaaaattaagcccaattataataggataaagtatcatgacaactgatattataggaattaatttgcttttgctacatattataagtagtataaaatatccgaatagtgtaaacaaaatatttacggggtcggaaagccatattatcatttgactaataatagagtagcccaaaatcaatatgattttgaaaatccaatgattcctaaagtctataaaataggaagtcaacttataaagaaaaaaggctatgaaaatattgattaatattagaataaaatttatgcttgtagagattaaagaataagtgtccatttaatatacctttctattaattaagattctggaaactaagttttaaaaaattaaatcttaaaaattaaaattctggaaattagatttcaaagaattgattttgaaaaataaaattctagaaattaagcttcaaaaaattgagttttgaaagattgaaattttaaaaattaagtttcaaaaaattaaatttgaaacaaaactctaaaaactaagcttcaaaaaattaaattttgaaagattgaaattctagaaactaagctttaaaaaattaagtttcaaaaaaactctaaaaactaagcttcaaaaaattaaattttgaaagattgaaattctagaaattaagcttcaaaaaattaaatttgaaaaaacaaaactctaaaaactgagctttaaaaaattaagtttcaaaaataaaattctagagattgaacttcaaaaattaaggttctaacatataccttgtaaattttcctacaacctcttgatattttttacggcttataggaattttttcattctgaactttggcataagtttgagttatactatctacatggtttagattgacaatatacctttgatgcgtacgtataaaattagagggaagaacagtttccatatcatttaattttccgtagtattctaatgttttatcaaaggtaactacagttaattttcttagctcgcttttaaagtagaggatatcttttgtattaattttacaaagattagttccaatatgaactgtaataaagttttctttccattgttctaatttttttagtgcttcttttaatactttacatattttttcagttttataaggttttaagatgtagttcaaagctcctacatcatacccatgaaatacatagtcagaaaaacctgtgacaaagatgattatagtatcttttgaatgttttcgtatagtttttgctatgtcaacgccattacttttttcaagttcaatatctaaaaaaataatatctatgtaataattttcgtgttctagattgtatactagactttctccatttgaatattcttttatttggtaggggtagccccacaaatccatttctcttgtaatgattttattcagcatgtttctttgttgtttttcatcatcacaaatacaaatcgaagtcaattttttatctcctttcaagttttatatttatatagttaagtatataatatattttgctacctagatatataaaatgaaataacaattatatccagatagcaaaataaaattttttatattagtatacttacacttaaaactattctattaaacttattctgaagtgctaatgattttcttattaaaaaatctaataacctttcttattataaaataccaatgcttttattattataaaaatgtaatgacttttcatattataaaaagcaaatgattatcttactataaaaatacaatgacttttaatactataaaaagcaaataattatcttactataaaaatgcaatgacttttaatactataaaaagcaaataattatcttactataaaaatacaatgacttttcatattataaaaagcaaataattatcttactataaaaatataatggattttcatattataaaaagcaaataattatcttactataaaaatacaatgacttttcatatcataaaaatctaataaccttttttaatttaaaatgctaatgcttttcttattataaaaagtaatgattttattactttaaaaatctaacaaccttccttattataaaataccaataatttttttgaatttcttataagttaatagatatataaggtacatataaactccacaaatccctataaaacctaagtttatcaaaagagcattgacctcactattgacgattctaccatcattatttaacataatcataaaattaaacagataaattaaaaaacttcctgcaataagagggtatgaaaatactttctttaattgatttctaatacagaactttatataatcattgtttgctcctaatcgatttaaatccataaagacctgcttgtgatttatagctatagtaacaccccttgtatatgcaatgattcctactgctgtaaaacatatgattgccacatatatgaataacattaagaagactgccatgttttttatcatatcttggctttgtaaaattttaaagttaggatagtatttccaattaagatacaactgattgttgtttgggtctagttttaaatgaccttcaccacttggatattcttcatccataaaatattttcttccagttgattcataacgtttttttacgtattcatcataaccactgaacatgcccatttccttagatgttctttttataatttctttctttaagtcattggcaaaagcataggtatctttatctacattaaatagtatagaattattgtaattttttatggataaatctttagtaaatgatttataatcctcatcattaaggacataggcgttcatacttctattttgaaaaaaagaaccattaaatattatttttccagcatatctaaaggggatttctttttctgtgactgggcttgatataaatttggtatatttataatcttgattttcatttcctttatttacaacagcaagatattcaccattttttatagttattggtttgtcaattagcttggaaaaatctttagaattaaagaacatatcataggagctttttttcatatataccctttcgatagttccatctttatgatatattgattctacaccatcaacaattaattctatagaaggaatttccatatagttttgaatttttatattgtgtttatctgctaattgttcaatatctttttttgatacctgtttatctctttgattgtaggtaaaagtataatctatagggttatttttaagagtatcatagatacctgcaaccatattaggaacatagaatacagcaaataatgctcctgcaatcaaaaatgaaataacacacatgttttttactgtttgtcttcccataaatctcatcatgctagttgatatgatgtttttatagtatttttctggatgttttcctcttttagcatgtacaactatgtatgtcataatcatatatattccaataagagagagtagataagtaaagctccatacagatggtagtctataatttaatttgtttatagttagtgaaggtacgatatatcctagaaaaatacctagtataataaaaattatacctaatataccataccagtcctttacatcctgtattggttcagatattctctggtcatttaatatatcaattatatttgtacgattaataaattttacagaaagtataaatatgcataatgtcacaaatacactaaatataaatccatatatgaatccttgagttccaaaatgatatgtcatttctctggtatcaataatcactaattgaaatattttccatataccaaaagatacaggaatacttaatataagacctaaaaaacagcatactattgaaattaacaatatctctgaaaatagaagtttttttaatttcttcttatctgttcctagagccatgaaaataccaatttccttgcttttaaattttaaaaagagggaagaagcgtatgtagtaaagacagcgcatcctaatatagcaactgagaatatcattgtagcctgttttctgctatctccaccagttggaagtatgttttgtattgttgggctaaaataaattagagcatatgaagttactaataccacagaaagtattatacaaaagaataaagttgtatagttcttccaattataggctcgaagtttgctgtataatttattaattgtcatcttgagcgcctcccatttcttttaaaacttctagtaattcatctaggaatttatgtcttgaatttgattttacaacttctttataaattattccatctttaagcacaataactcggtcgcagaagcttgctgcaaagctatcgtgtgtaaccatgagtatagtagcatctaattcttgctttgcttttaaaaatgattcaatgactgtacgacaagacttactatcaaggttaccagttggttcatctgctaatattaaatctgggttgttcatgagtgctcttgctactgctgtacgctgtttttctccaccagatatttcggcagggtatttttttctgatatgttcaataccaaatagctcgcatagattaattgcacggttttccatttgtaagacttgactacctttgataatttgtggaacacatatattttcaaagacactaagaccatcaaatagcatgaaatcttggaatacaaatcctagttgttggtttctaacttctgaaagttccttttcttttaaatttcttatattattatttccaagaattatttccccattatcaattgggataaaacatgaaatacaatttaaaagagtagtttttccacttcctgatgaacccatgattgcgacaaactctcctttgttgatttcaaaagaaatattttttaatacaggatatgttttattgcctgttttatatgatttacataattggtttactttaagcatatatatcatcctcactttcatttatcttgtaagtcaatgatagcatttgaaaggggaggagggatatgagcaatattgtaatagttggatgtttttttgtaatgtttgaaaatatattgtttggatagtgtgagaggttattattatagttaaattgattatattattggaggatttagagggttatttttaggtattaattgttgtgctaaagtaatatgatgtggaacattgaaggtgtagttagaaaaaaggtatatagtaaaagtaaaaaggttatagaataacgaatgttgtattgaaaaaaatgatgtaaataatgtatagtagggttaaaaagaaaaaaagaattatagagcagtaagattatttaatggaatgtattgtaaataatttgaaaggatttaggggttattaacacaatgtaattgagaaaatatattggagttttggaaataaataggtcgttaaaaacaattgaaatgtataataaaaaggttaaaaagtattattagtataggtatgatagataattttagaaagtggaagtattttagactatgctgaaaagtgattgatatgattttgagatattaaaatattactatattatagtaaagacgttaaaataataaaatgttgtaataataaaggtttgtagtataataaagaactgtaataaataagactttgcaatgtaatagaaatgctgtaataataaaagtctgtagtataataaagaactgtaataaataagagattgtaatataatagaaatgttgtaataataaaagtctgtagtataataaagaactgtaataaataagactttgcaatgtaatagaaatgttgcaataataaaggtctgtagtatagcaaagaactgtaataaataagagattgtaatagaaatgctgtaataataaaagtctgtagtataacaaagaactgtaataaataagactttataatataatagaaatgttgcaataacaaaacaccataataaataagagtttgcaatataatagaaatactgtaataacaaaacactgcaataaataagagattgtaatataataaaagtctgtaatataacaaaatcctataataaataagattttacaatataataaaaatcctataataaataggactctgtaatataataaaatgctgtaataacaaaacactataataaataagaccctgtaatataataaaaatactataatatagtaaaaatcatgcaataataaaaatctataataataaaccccagcataacaaagacattaatttcttactaaaaaggccaccacaattaacagtgaaaaagcaattgaaagtattgaaaaagtaaagtgagaattagagtcattattacgattattaagttttatccataaaccacatataattgtacacaacaataaaattgctgatattactcctataaatgtaaaaaacattaaaattcctcccccttatttaatgcaagtatttttagtcaatgagaatattttcaaacgttaccataaaataaaaaaatgtacataaaaaattaatatagtattattttgtaatatctaccaataataaatctaattgaaaatctattaaaccatttctctgttcaacattaagaatatcaataccactatacttgaaaaaagcattagaacgaagaaaaagcaactgaataaatgaagttatttgatacgcaatagttctgtattcagcttcagtttttttgttattctgattttcatagtgagccttaattaaaggtagtatctcaaatggataaacaatttcttcttgtatcaatatatagggtacagaaatctttataaattggctatgttcacctataaaatcaaaaaatgcaattagtatttcccttaattgctgtttaggtgctaaatttttagtatcatgtgtagccttatattcatccatatgacgctttaaaaattttttaatagaaatattaattaactcctctttagatttaaaataataattaatcatagctaaattgacatttgctttagctacaatttctctagccgtaatgcttgaaacatctctatgtgaagatagtaactggattgtggcattaattaattgttcctttgttgaatctgctttcataatttttccccttaaaagtttctccataaaaaaattaaacatgtttaatacacgtttagatactatcatgaaaattttgggatgtcaatgggtgattagtacttaagtatttaagtactaatcgattagacttttataagggggatttgaatttctgtaagataattttcaggatttatttcattatgctcacccttatgaccgatttgtctatttatacctgatatttgataatcactatttttatctaaccaataacagaacgattcatatgcaccagctatattttcatatggaccataaaccatagtacatgccatcatatcaatttcttctgtctcacgatatataaatccagatttgttctttccaatcttctttacaaccattccaacttcaatatctacaccattatctttgacttcttcatcatggtaaaaagctatattattgttgggttgacgtgatacttctatatgttcttctttaataaatttagataacttttcccagagtataccttcagattggtagtctgggactacctctctaagtgatatgattttataacttggaatctttttaaagacaacattgtaatgaatttcatctttatcacagtttatagcttctataaatttatcaattttatttattctttgttgttcgtgctttatttccttttgtatttcattcttttttctattcaattctttaattacaaattcatcattccaattatgtacgatatttgctatttctgcaacgctaaattttgaatctctcaataatacaattctttgtaatattgaaatctgttcaactgagtataatctatgacctgtatatttgtctatttctgcaggctttaaaataccaagttcatcataataacgcaacatacgaatagaaatttgtgttagttttgaaacctctcctattttaaacatgaaaatatgacctccttttcacttataattagtatatattttgtttttatatacttcaagcgattgtggaaatacaattattttccagatgttgcaataaattatagagagtaaattatatttaagtagtaatcgtatcaaatcatagattatcttaatttataattcatattaaaattaccagtctaactcaaattcaaaatcatccgactttatctgttcaatttcagaatttaccttctgtttaaatttattagaagaaatcatatatacaagaaatattaaaccaaatattatttgtacatattgagctattacacataatttaatagggtagtgtagaagtaattgaatgttgaaaaaatagtacatcatatgaactaacccagctgataaaatgcttctacttgtattgatatatacaaaattaattataaagtttaaaagtacaatgtttggtataaataaaaaagcatcaaatagggagtattgtgccaaattatatggtatttgattaggtgtaaaatacgaccctagataccagattccacaaacaagccctaaaataattgaagagcctataaatccaaatctaactaataatttgtcaatggcgtatcctctccatccagcttcttgactaagtatactcaatataaaacttgctaatagcatataagctattttagaaggtctaaacactgctatgtgtatccaatctatatcagaagtttttacattaaagtaatttccgattattaacgaagtaataaaagttaaagcaaaaaataatattgttaatagtatccattttattctaatttctttaaagcttaggtatctataaataaaatcttgttttgcactttgtggatagattgtagaaataaaaaatagacctacaatagctggtgatgtatatgcaagataaaaaatgatttctccaagtattgtatttgtaattccgagcaacgcaggtgtaagactgaatatccagttcaatactagcgtagatgtaaagaaatagattaagtgtttgtttgtattaaagggggtgttatatagttgcattttttcactatccttccgttttataatgaagttttaatttttattaattgtttatttatttttatatgtattaagttatcgtttgatgttagttattgcctataataatatcctattttttatattttgattaattatttttacactaaatataattaattagtatttaatattgaacatattatattattattaattattaaataggtcaataaatttgcaattagtgatattaataaattactttagatttttattaaatgtttagcttttctttaatattttttatataacgacgatttataataactttttcgttgttttttaaagtagcttgcatgcgattatgtgatattacttttatactttttatgtagtccatatttaaaatcatggatttagatattcgtgagaaggatgtattagctaataattttgataatttatatatttttaaatcaatttcaaatacatcatcttcataataagcaaatgttttatttccaactgtttcaaagtataaaatatcacagacattgagtttataaatctctcctgattttttaccttttatatcaagtaatggtgtactcaataatgaaattattttttcaatgttattatctagagcagaacattttatggttatttcaatatcatcacaattaataccttgttcgacatgtattttcattaatcatcacctcattttattactgtcattagaatagcattatatcttattgagtccaactagatgcgttctaaatttcaaattaagcatagtgaaattcaaaaataaaatagtgaaattcaaatttgaggtggtaaaattcaaaaaaatactatggatatttggataaattatccaaatatcctagtatttagcatagaatatgtctaattattttacaaatagacctattttatgacttacatatattgtcaaattacttcttaaatatcaaaatatttttggataatgtatcaatactgtttgataaagtatttaatttaccctcaattctaaccaacaagtacatggatagagctataggaaaaccaacattggttattaacagttgtaaactatcatccataaaattagccccctattctataactaagtcataaggagtggtatttgtttccacaaccttggcttcaacaacagaagctaggtcaaatcctccaaccgaaaaaatatttttagatactatcaaatccatgacagattttatattttcttcagttaaatcatcctttggattttctatagaaaaagaaacttgtttatcctttacatttttaaagctcatgactaattttttcttaatttccatataattacctccgatataataatttatattttaattgtttgcttgttaatattggtattttaattgtcaatattagtgttttgcttgttagtattaatatttcaattgtcaatattaatgttttacttgttagtattagtatttcaattgtcaatattagtgttttgcttgttagtattaatatttcaattgtcaatattagtgttttgcttgttagtattaatatttcaattgtcaatattagtgttttgcttgttagtattagtatttcaattgtcaatattagtgttttgcttgttagtattagtatttcaattgtcaatattagtgttttgtttgttagtatcagtgtttcaattgtcaatattagtgttttgtttgttagtatcagtgtttcaattgtcaatattagtattttaattgttgactctagttattgctgatatagaaaatatttaatttatttcaattaattagattaaagtagggtagcatttaaaatagctaacatgtttaagttgaaatacgtttaatatattaatttttcaaagcattaatatattaaagttataaccaaaattgaagttataatctgccaaatctatagcgtattaagtgcgttatataacttaatcttttatataaagagttaatttttttaatttgtaaagcagagtacgtttaaaagatactatttagataatgatgtactatctaattttaaaatatctacaatagggttctcttgaagacttgctattgcttctgcaacagcataaacatcttcatttaatgcctctgcttttacatttgcaaatgatttacttttaacaactgccttacccttatcatcaaaaccagcatccaattttagttttatactagataaattttttgttgaaacaacttccataaaattacctcctaaaaatttaatttcaaagatttgtcgactttctttgttagctataatactatcatctaagataatatcggagttaaacagtaatttctaaagattttttgtgtaaatttttataggaaaaattttacttttctgatgatgaaaaagtttacaagttatttttgaagatatgttcttagtgttttgaaatagtatttgtatatattcatgcttagttgagatagttttgtatggattttcatatgtgtagagttaaatgttaggtaccaaagtttatgttaaattaaatgttaaagcttatgttaaaaattttattaaatttaatctgtaaataaaaaagttaaaagtccaatattaacattttacttttaaaccattaaaatctttattaaagctaacaaagttataagttatgagaaattttattaaagttaatacaaaaattaattttaaagctaagaaattttttattagattcaataaaactaataaatatagtttagtcaataatgtattaaataaaaactttgttaagtctataaaaatatcttaaaggaggtgtaacttatgaagataaaagtggaggatataccagttcaatttcatgcaatggtagaaataatcggaattgataagttcatagaggttgccaagttgtatggaggaacaaatacttatatacctacgtataaggggctttttagatatgctagaaatagggatatagtaaaacaatttaatggagtcaaccataatgaattggctattagatataatatgtgtgtaagcaatattaagcgaatactcaatgaaaataatgtttaaacataatgaaaatagccttgttaaatgtaagagtaaagacaaagaagatgttttataaagtttttttagacaaattaactaaatttactacttattaatttaaatacattgtatattctataaaaaaatttgttaaatactggagatatattgagaatacaaagaaaatggtcgaaaatatttgttggctaaaaaatagataaaatgatacaattgcttgtataaaggggaaaaataaataaataaactatataaataaagaaatagcaattaatatgacataatatatttataaaattaagaatataaatagatattttaagggattagttgttaaattaggaaatattaaaaaaatatatatatttatatttaaactattttgttatttatataaaaatacttatctagttactagcaattattagtagaaatgggggaaatagagatgaataagggattttacaaattaaattcagtggtattgaactttgatattaagaatgatgttaacaagataagatttaatcattatataatgagaaaagaaaacatacaaagacttcaaggaactctgccaaacggacaattttatatgacagtgagaagagctgctacagatttacaactttctatttctactataagtaggcttgtaaaagagtttttggatttagggataataagattagtgtctaagggtgtaaaaggtaatcgttctgtatatagttacgtaagtatagagtttaatggaagtttatttgatgatagcaaatatatggaacttgactgtgtatgtaatgatgaatttattgataatagtggcatagagtttgattgtgatagcaaagataattcttttaatggagatataaatgtagaaactgtgcattgcattaatgagtatttctctgatgatgatgtagagcataattataacaatttccataataaagatactataaaggataaagccatttctaatattagcactatcaaaaaatatattgatgaatcttttgatacaaataaatcagaaaattctaacttacaacaggagtcaataaatttcaactttaatgatacatgcaatgaaatagataaaagaacgaataatagtatagaaaataatcaaaataaaaggcctatgagattgagtgacatcagtgttttaagtgataaaggtatgacaaataaaaagaattactttaatcataatcatggtatacaaaaaaggaataaatctgcaacaaagaaaaaagaatccttaaataaatttaataaaaaaaatatacagcaaagcattataaatatgctaaataaaaaatcaggtaagaattttaaaatcgattctccaataagcataaaacttatcaatgaaaggctaaaggagggctatgtcttagaagatttctataaagttattgaggtaaaagtggctaagtggaaaaataccataatggaaatgtatataagaccagaaaccttgtttagctataagtttgaatcctatgtaaatgaaaacatatctatgaaaagtcaaagtaatgttcatccatgtaaagaaggcaatagtaatgatagcagtaattatatacattctgattatacaacatatgatggcagtgtgcgtgagagaaaaaaatatgagaatgtaagatactggaatcctatatgtgaaatttaattagtttaagaatgtatttatgataaataagatattaatagagaatagtgagctatagcaaatgatatatcaatagttggtagtaagttatattaagcaagatattactatcaggtagtgaattatagtgaacgatatatcaataattggtagtaagttatatcaaataagatattactatcgagtaatgaattatagtgaacgatatattaataattggcagtaagttatatcaaataagatattactatcgagtaatgaattatagtgaacgatatattaataattggcagtaagttatatcaaataagatattactatcgagtaatgaattatagtgaacgatatattaataattggcagtaagttatattaagtaagatattactatcaggtagtgaattatattgaacgatatatcaataattggcagtaagttatatcaaataagatattactatcgagtaatgaattatattgaacaatgtattaataattggtagtaagttatatcaaataagatattgctattatgtagtaaattatatgtatcagaataaatagtatattaataatttgtagtatatcatgacgaataatatagtcataacaaatagtgagtcataacaaataatgtatttataattgataatgtatttaaaaatcaaaatataaaaacttataaggaaagagagattaatttatatgggtaaatcaaaagatgttgaaatagagaagtctattttaggcacaattcttttagacaataaattaagctataagctagatgaattaaatgaaaacatgtttatgaatgatatatgtcttgagatatttaaaattatgaaagaacttaaaaaagaaaacatagtgattgatgtggccactgtgaaatcaaagatagatagaaaatctctagcaataaaaacgagtgatgtgactaatctaattacttggggtcagaattttggtcttgatggtcatattaaaattttaaaagaaaatttagctagaagaagcataaatcaaaactgccaaaaccttttacacagcctaaaccttggagaaaatatcgatacttgtatttacaaatttgaaagtaatataaaggagattttggacaaggatacttatgaaaatgatgatgtaaatagtatagcagggaaggtgcttgattttttagaaaacaaaaaagatattggatttaaatttggtataaaattacttgatactactataggaggtctttttaaaggagagctaaccacaatagcagctaaatcgggggttgggaaaactgctttggcacttcaaataatgttaaattcatttaagcaaggtaaaaaaactttatttataagtagagaaatgaccagtgagcaagtatttatgagaaatatatgcagagtaactggtgtaagtacaaggaatatgaaatctaaagaaatagatgaaaatgattggaaacttattgtaaatgctataggtgatttaagcgaaaataacttaatttatattaatgataagatagatacaattagtgcaattagaaagaggataaggcaggtaaagccagatttattaatagtggattatgtgcaactccttacatctcagaaaagcatggataagagagaaagggaggtagctactttttcgagagaacttaaaaatatgactttagattttaatatacctgtaatccaattaagtcagttaaatgatgaaatgaaagattcaagaccttatggagatagacctatgagggatagcaaagccatctaccacgatagcaacaatgtggtttatatacatcaattaaaggggagtgattatgaagaagcagtgagagatattggagaaagtgaggaggcagttagagcatcagaatacaggggaattaagatggttgatttaatagttgcgaagtgtagagatggacagactaggcataagcatttttgttactttggggataagttacattttcaagaactaaattattaggtcaataaagtagtaataacaagcttattaaaagtcaggaaatagcaaatagattataaaatatgaggtgaaaatatgttggaattaacgaaaattatagaattacttgaagaacacaagatagaagtaagtattccaaaggagttacataagtatagtttattggaataccttgaattgtgtcaacaaagtgggggaacatatttttatattaaaacactggaaggggcattaaaagaggctagaaatgagcttatgattaaattgtttaatgggaaaaattatatggaattagcgaggatgtttgaaatgagtgttattaatgtcaggcatattgttagaaaaaaatagatatttttggagaatacaagtgtgatatacttctgaaatagaagttattatagttgaaataaaattgtggctaatttgtgtataagtttaagattatagaggagtataagtgtgattaacagcatgattttgtgaataaaattgatgatatatatgagttaaatgtgtgattaataaggtaaggttgtgtataagattatgagtatttaaaaggaggggctataattaatagtgtagagttgtatgtttgcttaagattatataataatttaatagattaaactatacgaataaggtaaaatcgtgtgtttagttaaagcttattataaaatcttgatatgcgattaatgatgtaatatgtgaataaagttaagattataatagatttaacctgtggctaatagaataaaattgtgaataaagttaagattataataggtttaacctgtgattaatagagtaagagtgtaaatagagataaacttcaatgtgggtttaacttgtggttaatagagtaaggtgtaactaaagataaacttcaatatgggtttaacttgtgattaatagagtaaggtgcaactaaagataaacttcaatatgagcttaacctatgattgatagagtaagaatgtaaatagagataaacttcaatatgggcttaacttgtggttaatagagtaagagtgtaaatagagataaacttcaatatgggtttaacttgtggttaatagagtaagaatgtaaatagagataaacttcaatatgagcttaacttgtgattaatagagtaagagtgtaaatagagataaacttcaatatgagtttaacttgtggttaatagagtaagagtgtaaatagagataaacttcaatatgagcttaacttgtgattaatagagtaagagtgtaaatagagataaacttcaatatgggcttaacttgtgattaatagagtaagagtgtaactaaagataaacttcaatatgagtttaacttgtggctaatagaataagattgtgaataaagttatagttttagatgggtattaacctgttactaatagaatatgattaggtgtaaaattatagagctgtataagaaaatattatagatatattaaatattagataataaatatttatatagatacacaaaagaaaaggcgatatgaagctaaacttaatgacttcatatcgttttttatttgaaactcctttgtatttagagtgtgatttttaatattgaggttttatgtgattaagtcacagataaaaagtaagtatcttgatataattcttatagattaataatatagggaggttattatgtctaataaaaaaaagaagtatgcaaatattttagcaaatgagtgcgttgcttgtggtagctgtataaaagcatgtccaagaagtgctatctcagttccatgtggcattagtgcaaaaattaatagagatttatgtgttggatgtgggatttgtgaaaagatatgtccagcatctgtaattgagattataacaatattaaaagaggaagaaggtaagtgtcatgaataataaaaaacattggtatgactatttatggattttttcttcaatatatttggtattgggatttgtaaatattattttcgcttggattgggctaatttgtttctttgttccactagctatttctattgttaagggaaataaagcttactgtaataagtattgtggaagagggcaactgtttaatttgcttggaaataaattgaagctgtcaagaaatagagatattcctaaatttattagaagtaagtggtttagatatgggtttttgacattttttatggtaatgtttgccaatatgcttttttcaacttatttagtgtttgaaggaagtagaaattttaaagaagtagtgactttgttgtggactataaaaatgccttggcaatgggcgtatcatggaactttagtttcaccttgggtggtacagtttgcatttggtttttatagtgttatgcttacatcaactgttcttggtttgattactatgatattgtttaaacctcgttcatggtgtgtttattgccctatgggtactatgactcagatgatatgtaaggcaaagagtaagtctgtataggaagagattttgtgaagatttaaggggtttaatgtttaaagctagagttgatttaagaaaataagaaagatataaatatctaaatatgaaatagattcaagatgagtaatagtttctattagctatgataggtatatgagtggagcataaatgaagtttgtataaagtaaactcatttatgcttcttttttacatgatacattactaattaaatagaaaaacaatgtaacaacttgtattttaagtacgtcagagaaatctgaagaaatgataaatgttatagaagattgtaaacttatgcttaaaacaagtaatagatatttaaaggaagcagattaaatttcaagaagtcttacgtgcttgttgaaacataaactggatttgttacagataaactaatttatacaatattttttaattaatatgttttcattactatatattatatgttaatacataaaaaaatggtggctgttttattaaaggtaggtcaatgacatttcttataaaaataaattctaactttaaattaacttaggagttctgtataataattatatgttgaaaatattatgaagttttgcttatacaataaataattgattttatttctggtaaaggtgatagaaaaataaatattcagattatatagtaaatttaactatatatattaaactataaaaaggagattttatatgatgaaacgagatatttactcagtacagttagattatatgttagcataatgtactgagtaaaataataatttgctaacaaatagaactgtactgctaaaaactttaggttttgttaacttgaaatgattaataatcacactaaatttaaacaaataaagaaacattttatctataaaattattttaagttaataaagtaaaataaataaggataggtgtacagttatgaaatatttaatagaaatagcaaaaaaagagaggttattagtttttatatatttagcactaggtataggaatagaacttttaaatagttttagtgctaattattatcagagcctaatagatagatttaataacagtactataaattttcacataatttttatctatggaactgtattagttactttatgtcttttaagatatattgatgaatatccaggtagaagactagaacatagtttttttttagatttgaaattaaaggctttagaaaaaatgagtaaaatagattacttagaatatcagatgttaggcactggaaaattaattcaaaaaattgaaaatggagctaatgctggcagaaatatattttttaattttttattagccgttgttagaaaaataattccatcaattttatttagtatggtttttatttatagaattgataaaaaagttatgtttaccatattaattggatattttatagtttttattattactaatttactaataaaagctctatatcaaatcaaagagcatatattaattaatgaagagaagatgaatcattttttagttcgtggatttgtagaaatggttgtatttcgggtaaacaaaagatttgagtatgaaatttgtcagtcaaaatttgcgaaaaaagaaattattgattctagggttaaaatgacactgattcatgaagctttcttcacgattttttcattaatagtgacgttcataaaaatgttaataatagtttatagttggaaaactaaaacaataagtataggttctataattgcattgataactttactagataatgcatatactcctatagctatttttaatgtattgtatattcaatttaaactagataaagcagcatataaacgctatacagatattttggaacttaataatgatggtcaactgttagcaggtaaagaagttaatttaatgtatggaaatattgaatttaatgagattagcttcttgtataataataagcgagagatatttaataaacttagtttaagtattaaaagtggagaaaaagtagctattgttggagagagtggttctggtaaatcaactttaattaaactattaattggattattaaagcccagcgaaggaactatatttatagatgattataatctacttgagatgaatctaaatagttactataattatgttacatatgtgtcacaggattcacctatatttgatggaactttacgtgagaatattgtatttggaaaaactataaaaagtaatgatattattgaagtcttagaaaaagtaggtttaaaaaatttatacttaaaattagaagctggtttagatactaaattaggtgaaaaaggaactacattatcaggtggagaaaagcagaggctagcattagcaaggctttggttttcagatgctaagataattatattagatgaagctacatcagctttagacaatattacagaggaaaaagttatgctaaatgttatggaatttttgaaagataaaacaactattatgattgctcacagatttaactcaattaagaatgttgaaaatataattgttcttaaagaggggagtataataggtagtggtagctttaaaaaactattagatggtaatttatattttagagaattatactatacaatgtcataattattatgtaagtataagaaaatatttttcttaatttaatattatttaaatattactggaatattattaaaaatttgagattccagtaatattttttagtattattcttaatatttacattaacatatattcttccatttttattaacttgtatttaaaatgtaatatttttatataaatatgaaaaatatcaagtatttaaattaaataaattcatatccattaattgagggatagatattaaaagattagaatttatgagttattagaaatattctatataaatagcatagaaaaatagttaaactaaattattaaaatataaaaatatacataaaaaataaatgtaaatatcaaataagatactatataaaaatagatataagtatcttttttattattgaaattatgaaaatatatttgatttcacacaaaaaagagtgcctcatgaactaaaaagttcattttgagacacacttttacagtgtcaaagaacgaagtttatccttatccaatacttttataccaccacgagataaagacacaataccttctctagcaaaatatttcaacattctcgatacaacttctctggcactacccatatacttagcaatttgctcatgagtcatatttatagtgctactgccatttttagctatctcatcaattaaaaaagatgccaaacgcttatcaaaactcataaaaagaatttgttgcatagcccacataacatcagaaaaacgttcggtagctaatttatatgaaaataactctgcatgaatattttctgtagataattttgcaaaaacagaggaattaatctgtataatatcgcagtccgtttcagcatctacatagacatcaaaagttattgtttttagaatacaggaagctgataaaatacatacatctccatcatcaagtcggaacagtgtaacctctcgaccttcatctgaaagtatgtatgtacgtattgttccagactttataatcaaaataccaatacagtcactatcaccacaatgtactggattcccttttttgtaatccgaggtatttgctgaagaaattaataattctttttgtaagtcagtaagtttatcccaaaaaggcaagctatgtgtaagtatatcaatttcattttgtgaaatcatacaatatctcctttcttaaattgttataatcccatgatacaagtgaatagataaattgacaagtagtttgttaagaggattatttagtcagatagtaatagtatgatttatgtagaaaaaatatgataatatatattcttgctattaatgagaaagtaatatgttttgatgatagtaggtttgtataactaatgcataccgtttatttttaaaagattaagttccttatgtaaccttatagacataaaaccagcaattatagcagccatcaaatcagctattggttgtgcatataagataccatttaacccatagaatacaggaataatcaaaattatagggataaaacagacgccttgtctacacatacctaaaaatccaccttcctttgcttttcctagtgctaggaataatgtagaatacactgtatagaatccaaatagcataaatgaaaacccatttgccctaagagctttactaccattttctattaatagaatgtcaccacttgtaaattgtgaaattatagattttgggaaaagcaccaatataagaccaagcactacacaaaatattgtagtccataatatggaagtttttattgctatatgtaatttatcgtagttcttcgaaccaaaattataaccagcaattggttggaaaccttttataaaaccaaatacaacaagactacctaaagatgttattcgtgttacagcacccattccagctatcacagaatcaccatactttgtagcctccatattagttaatgtaatggcaagactagtcaataattgaaatattaatgtaggtatgccaatttttaggatttctgaaaaaatttcttttgaaaaacagcattcgttaattctaaaactaaatatacttttcttgcttaaaatatatcctacataaacaagtgttgaagcaatctgtgagatagctgttgcaatagaagcaccccttacccccagaccaaaagtataaatgaatatcgggtctaaaatcatattaagcaaagcacctaataacatagcacacatagttgttttagcagctccttcacttgtgacaatattagtcatagtgacattgaatatattaaaaatagatgacacgacataaatgctagcataagatattgcataaggcataatactttttgtagctcctaacaattttaaaattggattgagaaaaatcataatcacaataataactaatgtacccactataatactactgtaaatagatgtacttaccacttttcctgctttttcattatcaccatggcctaaaagtctggcaatatatgaagcagctccatttccaaacaataatcctaatcccacaacaagctgacctaatggaaatgcaacggatatagctcccatttgacttgttccaagtccacccacaaagtatgcatcaaccaaattgtataatgcagttatcatcatacctatcatggtaggtaatcccatagataacaatgcttttgagattggggcagaccctaataattcaatttttttgttactttctttcatacttaacactcctcttctattgacattaagtctaaattataatactataaattatagtaagtatggaaaatagtactataatttatagtatttgtcaatagtaagaaaactaaaggagatgatttttatggctacaatagatttaattgtattgggaatagtaaagcaacaacccaagagtgcttatgatattcaaaaggcagtggaatacaggaatatatcacgttgggttaaaataagtacaccatcaatttataaaaaagtaattcaattagaacaaaagggatatattgaaagtaaaactgtgaagaatggaaaaatgccagaaaaagcagtttattcattaactgaattaggtgagacacattttttagatttaatgtttgatacatctagcaaaccaataaatattcttttagattttaatgctgttatagtaaatttaaatagccttacaccagaaaaacagaaattatgtctcaataatattgaagagaatgttcaagagttaaagaaaactattgaggaaaatataattataaagacagaagtaccagagacagcaaaagcagtgttggagcaacagttggtgctagcacaagcattggaaacctggataaattctttaaaagataatatggggaattagaattagagaagctaacttaataatcattaaacaaaaaccagcatatttaataatgagatattagaaaaaatgaaacaaatgatataaactgaaaagtatatttaaaataaagctcacttaattgagggagaatgttaaactttttaagagcaagagcaagagcaagagcaagagcaagagcaagagcaagagcaagagcaagagcaagagcaagagcaagagcaagagcaagagcaagagcaagagcaagagcaagagcaagagcaagcagtaaagtataaaattctattactataataaaagatagaactagaagtctttatgaaagtgggaaaagtatttatataaataaatttatatggtttatagtttaacagtaggaaatatcgtatgagtgagaatatcgtattttacataaagatttagcaatatgacacactgttgtcgtgttctgtaggatatgattaataaatcagatatgaaaggagagtgagtaatatgccagaattactaaaaaatatgtataatcgtgagtcactttatgaagttgcagtagctatccaatcagtttacaactcatttaaggtagacgagttcataaaatctacaatggatgagacatggaataacttagaattaaaagccagatgtcgaaagataagtatgagtttaggaatgtatttaccagaagactataaggaagctctttccattcttgaaaaatcagttacaggtttttattttgcttttttctttccagattttgttgaagtttatgggcaggacgaaataaattgggatttatctataagtgcattagaaagaaatactgagtattggtcttcagaatttgctgtaagagcatttatcatcaaggatgaagagcgtatgatggcacagatgcgtaaatggtctaagcataagagcgaacatgtacgaagacttgcaagtgaaggttgtcgtccccagttgccttggggacaagcaatatccaaatttaaaaaagaccctacacctgtactgcctatattggagcaacttaaaacagatacatcaacgtatgtacaaaagagtgttgctaataatctaaatgatatctcaaaaacacatccagatttagtcataagcattgcaaaggattggtacggtaaaaataaatctactaactggattgtaaagcatggttgtagaactctactaaaaaaaggcaatcgtgatgtattagccctttttggatatgatgatactacttctataaatcttcaggactttactttagaaacaacgtctatttctattggagaggatttaactttttcatttaatattttagcaaaaaaagcgacaaaaacaaggctcgagtacggaattgattatatgaaatctaatggaaaaaggaataggaagatatttaaaatatcggaggtttcattaaaagaaaatgagaaaaagtcatatatgaaaaaacattcatttgcagatgtaagtgtaaggagacattatccaggtatccactcgattactattattattaatggggtagaaaaaggcaaacttgattttgaattaggtgtataattttactaacagcataacctatatcagatactttgctaaacctatatcgtatactctaataaatctatattaggtagtttactacttgtttactgaatttaaatacaaagaaatacaggtgttaatccctgcccattaaaggaatatgagcataacacaaaagtagaacttatcaattctgttacgggtatagtagtaaatccatagaatcacaattagaagatgaagtgtaaaaaataagttagtgttgattttagttgctagtgatattgaatagttatacaatagccatataaattagaatttgtagaggagaaatgtaaatggatgtatatagtttttggaatgacactttggcacaagatgctgttaagataagaaaatattttcatgaagatgcttatattaattggcatgatacaaatgagcattttactttagaagaatttattattgcaaattgtgagtatcctgataaatggaatggtaaagtagaaagggtgctagaatttggaaatttagtaattacagtgacacatgtttatgcaataaataaaccactatcatttcatgtcgtttcatttatcagccttaaagatgataagattatttctattgatgaatattggggagaggatgatgatgtgccacagtggagattagataaacatattggaaagccaataaaatagtgtttgttctgttttataactgaaattttgataacatttgatattttgatttgtcattggtcaacatagtcgttagtgtaataatttaaaaaagtagaatttggagagtgagcactatggaagaaaaatacatcttatctgaccgaggtaaagtatattattggataaaagaaagtaatagtgtgtttgcaaagaacttaatttttttgccaggactaacagcaaatcatcatctttttgatttccagatacagtacttttcaaaaaatcataatgtattggtatgggacgctcctgctcatggaaaatcaagaccttacttagatttctcatattctaacttggtagaagaattgaaagtaattttagataaacaaaatatgaaaaaggttgtacttatagggcaatcggcagggggatttgtggcacagtcctttattgtaaaatatccaaatatggtagaaggattaatgatgattggaacttgtccatatggaactgactattatagtaagtcagatattttctggttaaaacagactgaatggatgttaaagttattcccagataaattgttgcgaaacataatatctaagatgtgtggagctacgtctgaaggcagaaggagtatgatgaaaatgttagaaggctacgaaaaaaaagaactgtgtcatctcatgtatctgggatttgctgggttcatgccagaaattcaagacttaaatatacattgtccagtttgtttggtggttggagataaagacaagacgggtaaagtgagaaaatataatgagcagtggcacaataagactgggtatccattgcacattataaaaaatgcttcacataatgtaaatgtcgataaacctagtgaactaaatcagattatggatatatttattaagcaattaaatatataaaaactacatactcattaggtaaattatgtagtatatgtgtttacatatggttatagaaataaatatgtaataaactacttaacacttaaaaagtggatttgtccagagcataatacaaagcatgatatataaatttttaagcgaaatacatcaaaagaagtattagaattagtggagataaaacagctattagagattataaataaatagttttaaaggtactacgaatatagaggaaggtaaatcatacgttattcaaggattataaatgagtagtttaaaagtactatcggataggtctctgcatatttaaaccttagtaaaggtagttaaagtagtagtttaaaaactaaaaaattatataaaggaattaggtataagaaaatgattgagagtataccagcaaaacaaattttacaaaaagtgaaatttgacaatacaagatggtttggaattgactataatatgaatctctatcgtggttgttctcatggatgtatatattgtgatagccgtagcacaatatacaacatagagaattttgacaaagttagatataaagaaaatgtgatagagattttaagtaaagaattgcgttcaaaaagaaaaaaaggggtagtaggcattggagctatgtctgacacatataatccttttgaaaagcaactttgtattacaaagcaagcactagatttgatttcggaaaatcattttggagtgtctattgatactaaaagtagtttggtggttagagatataccgattttgcagaaaattaaaaaaaataattctgctattgtaaagttgactataaccactgcaaatgatgaattatcaaagaaaatagaaccttatgtaaatccaagttctgcacgatttgacgcagtgaaagaacttaatgattctggaattttttgtggcatattattgactcctatgcttccatttttgactgataataaagatgaaatacgagcaattgtagaaaaagcacacaaggctaatgcaaagtttatttattgcatgtatggtgtaacaatgcgtagtggtcagagagagtttttttatgagcatttaagagatatatcaccaaaattagtacttaaatatcagaaaacatatggtttaaactatgtatgtactatacaaaataaagattcttgtgagaagttgttaagagaagaatgtgcacgttatggtattttgacagatatgaaagagattataaaagcgtacaagaggtcggagtcatatattcaaataaaatttttttaagataggctttggatgagatataatagtggtgattgatgtgttgatattatagttgattgttagagaggatattatagatgaatattaatattgatattctaggtaattgctagaactaatattatagatgaatattagtattgatattctaggtaattgctagagttagtattatagatgaatattagtattgatattctaggtaactgctagagctaatattatagatgaatattagtattgatattctaggtaattgctagagctgatattatagatgaatattagtattgatattctaggtaattgctagagctgatattataatttattattaatattaatattctagggaattatcactatattttaaaaagtaaaaatatatatcaaaatgaactaaataagtactgtaagaagtttgttaaattaaggtttgaataaagtgagggtggagaacttatgatagaaataaaaactatagaaataaataaaaaaagtcaaattgaccttttaatgttagccgacccatgtgaagaaatgattgataaatatctcaataaaggaactatgtacgcattgtatgataataaagaacttacttgtatagcagttgtaaatgaaatttccaaagaaatatgtgaattaaaaaacattgctacatatgagcattttcaaaatatgggttatgcctcaaagatgatttatcatcttttagatgtttatagtaaaaaatattcatcaatggttgttggtacatctgaaagcggagttcctttttatgagaagtttggatttgtttattcacataaaattaaaaacttttttgtagataattatccagaaccaatctttgaaggagaattacaatgtgttgacatgttgtatctatcatataacttttagataggataatatttttaggtagatataattaattaattcatataattatcggaattataatttataaattatgtataataagagtataatttatttagaagctgttatattgtattatattcaaataagatatataataatttgtttattttgaattttggaggattaattatggattcaaataataatactataaaatcaactgttaaaaagggtatttcttttggttcttgtttagcaatgattatttcttatactgcatggaaatctattccatgggctatttttcatggcttaatgagttggatatatgtactttattattgggttaagtatgcatagattaaattaataaataagtatgtaatattgtaaagtttaagaaacaaaatgtaagggagtgtctcgaagtgaactttttagtttataaggcactcttttttgtattaaataaaatatattttcattacttaaacaatgaaaaagatgagtatctctattttaatacatacccttatattcattcatttatcaacaatagttttaaaaagaaagctatctaaaatctattgtaatctaagtgcttctctttaaagtcttaactttagtaatgatatataagtttataaggttcttatttcaataatgcaaattttacttagaagttcagactttggtatgaagaaatgggtaataataaaaaagaggtgttgatatgaaagaaaaattagaagaaaaatctaagattattaaaacatcaaaagagtataaacgaactataattgaagaaaaggacagagaatgaaccaaaaaattaaatgacatacttagtagaggtgatttttctaatgaaaaattagataaaatcaaggatttaattccaaaagaaatattgactagtgaaaatgttggagaagttgtaactgaagatgggtatgctaagcctgagtatgatgaggtatttaaatcattgtttactttaaataatgattacgatttacttgcaaattttataaatgatatcctcaaagatgctccatatgccaataggaatatcaaaccgttcactcatataaaaagaataattaaggctgaaaccgacccaacaattaattacattggtgagaaaagacctagactttatattttggctgaagatgaagaaagtaatcatataaatattgagatgcaaagagctcttgaagatgattatttggaaagagctgaatattatcttagtcgtgtacatggtagaaagttagaagaaggtaaagagtataaagaaattggaaaaactgttggaatacatatactaaatcatgtaaaatataatcacatagaagattatgtaaattgcctgagattaacaatggacgggcatccaaatatttattctagtaaaactgcattatattttatagaacttccaaaaattcgtaaatccagttgtatagcaaacagagttctaatatggggtaaacttattgataatccttctcatattgatattagaatactatctaaaacagattatgttattaaaagagcacttgatagattaaaagaattaggcagtaatgaggactatttattaaatttaaagagaggtgcgtatattatgaataaaagtagaaattttaaagaagaaatttttcaagaaggtgttgaaaaagggaaaagagaagagaaatttaatatcatcataaaattaaaaaataaaggatataatttgagtgaaatatgtgatattatagatgatttgaataaatcagaggttgaaaaaatctataatcaaaactaatactataattgagatggcactagataaatataaagcttcctcttttaaatttaaattaatataaaaccttgttatttaactatagtagatacaaagagatatataagctaaggagatgattcaaaataaaagtttgaactatctccttcttatagaaaaacaaaggggttgatttatatatgaaattttatactatacagactttagaattttggaacaacaataaaaacaataaatatctatcaaatgattattcttttatattagaagactttgatattccatacaaatggatgtatagtcaaatgacaaatagaatatatgaatttgatgatagtatgatatgggtttggacgaagagacctgatttaagatgtagtggttatttagaaaaaggaaaaaaaggtgttttacttgaaatagaaataagtgaagacaatgtgttattatcagaatttgatttatggcatttacctttaatggatattactgtagagctttatgaagatgaacaaattgaaaagaaggtaagttgggaaagaatatttgacttagaactgtgttcaaaattaaatgaagttaatatagaagatttgacattgcaaggagtgacatctaaagtgcctctatctaatgtaaaattaataaaagaatttgttgcaaaataatatttttattgaaatttattcaaaaaagttatatatttataacaagaggtgttataaatacataactttttaagggggattttatatgtctaaacaacaaactggtattaaatcaacacttatttcagaaatattgggaatttcttattgtattggagctacattagtaaataagtatttttttaaaggaagtagtattgaatatcttcctataattatttgggtattagctatgggagctcagtgggtctataataaaaagtatgatgatttaattgatgaggcatcaaaatgtatactatcaagagttaatgatattgcaataaaagtattgtttttttctgtagctatagtatctatatttcttgtaactttggacataaatgtgtcaaatttaaatataggaatgtctttattagtcattttgtttattcaatccttgttgaagttaattctatttatatattttgacagaaaggggatatacaattaggtgtcagtattactaaagacaaaaattaaatcctatagagaaaagaatcttatgacacaaggtgaacttgcaaagtcagtaggagtaagacgtgaaactattgtacatttagaaaatggtcgctacaatccttctttaaaactggcaatggatattgctaaggtatttgatacaactgtagaagagttgtttgaatttattgaagaaaataatatttaaatttcatgtattacttatgcattagagaatgaattaatagataaaaaattcaagtttatgtattagagaatgaattaattataggtaaaaaaccaagcttatagattagagaataaatgacttatagatgaaaaaccaagctcatagattaaagaatgaatgatttatagatgaaaaagaaagcttatagattagagaatgaattaattataggtaaaaaacaagctaatagattaaaaaatgaatgatttatagattaagaagtaagcttatagattagagaataaatgacttataaataaaaagaaagcttatagattagagaatgaattaattataggtaaaaaacaagcttatagattagagaataaatgacttataaataaaaaccaagcttatagattagagaatgaattaattataaataaaaaccaagcttatagataagaagtccatgcttataagccagaaaatgaatactttaatagattaaaaaatacatatttgtgaattatagaatgaataactccataaactagaaaatttataataatatctatatgaaaattagaattattttatcacaaaaaaattaagttaaataaatatgaaattacttccaaatatacttccaaaaacatgtaatcgcatatataatataattataaaaataataaatatttttatagtagtagttaattattaataaggaggggtcaaaatgcctagcatgattatggaagttgtaggagtactatttatagctattggattaatcttgacattcattgaaataaaaggaaatttcccttctttttatggttttggtcaaaattctatagggaaaaatgctgtaggtattatagcagcaggaattgctttaattttctttagaaatggcatagatagcatagattctatagctacttatggtgtatttttagcaatagaacttgttgtaatagttgcatatttcttaataagaaaaaaatttactaaagaagataaacatttaagaactaattaactaaattatctactataaaattggaaaattaaaaacaaataaaagtttgtttttaattatttaaaatcccaatttgattatttttaaagaaactatattctgtataaaactagaatgtggtttcttttttatgtataaaatattttttagcaaaagttaaaaggtgttttataatataaaatagttaattgtagatgttaataaaagaaaattatgtatatttcagataaagataagagagtatactatattttaattattttttcaataaaacttattgaaaagaactttaacttagaagagtatcaccaaattgcagatacaatatcataagcagttatttattgacaaccctttttaataaatatatcatttgaagtatactgacgaaaaggagttgaataataatggacatcttattggttgaagatgataagaatattcgagaaatggtatacgattttctgattagtgagaattattttgttaaaactgccgttgacggaaatacagctattgaaatatttaaaaattattcatttgatattattttactggacttgatgttaccaaagtctagtggttttgaagtattaaaatatatacgaagtgtgagtgttgttcctgttattattactactgcgaaagatagtgacacagataaaatgctagggcttaatcttggtgcagatgattatattacaaagcctttttcaatcgtagaattgcttgcaagaattaaagctaatattagacgtgcaacggtgtatagcagttcaagaaactctgaagatatggttattcagtataaagatttgattataaacatatcaaaatatgtagtttcaaagaatggaattgacttaaacttaacacatacagaatttgaaattgttaaattactagcgactaatcaaggacgtgctttttcaaaggaacaattatacaacactatttggaaagaaccttattatggaaatgaaaatgtgctaaatactcatattaacaggttaagaaataaattgtctgatggtatagaaaaaaataattatattaaaactctttggggaattggctacaaaatggaggaagaataatggagttatttttagttgtaatttcgattgtactatttgctttctacttaaaagaacgaaataagtcaaagaaaatggaaagtgattataagtatatcaattcaagacttcgtgatataacaaatgatgatgaaattaattatattttagtaccatctgatatttcgattgtaaaagaaacagcagtagatataaataaacttcttgaaaagttttacagtaggcaaattaattataatagaagtgaaaaagcgatattgcaaatatttacaaacatatcacacgatttacgaactcccatcacagtattaaagggttatattgaaatgctatatcttcaaagtcaaaaagaagaattatcttcttcaatgagagcaactttggaaaaaatgcaaacaaattcaaatgagcttgttaattcaataaataacctgtttaatatggcaaaaatccaatctggagatatgatattaaatcttcaaaaatccaatctaacacaattatgtcatgagattattttagagttttatgatttactagataaagaaaactttaatgttgaagttaatattgaagatagacctatatatgcaaatgttgacacagaagcattacaacgtatactcaaaaatttaattgataatgctataaaatatggttcagatggtagatttttagggatttcactatatgaaaaggaaaaacatgtttttatagatattgaggataaaggttcaggtatttctgaaactgaaaaagagcatattttcacaagagcttatactgctgacagaaaaaaaggcaatggtttaggtttggctatttctcaagggcttgcaaactctatgggaggttcaatttatgtaaatagtagacctaatgtaaaaacagtttttacggtaaaattgaaaagttagaaaaaagttagatttaaaagagagaaaagataattttattttgtatactgtttttagaaaggagggagtatgatgaactatatcatagagacccatcaattaaagaaaatatataaagataaagctgttgttaatgatgttaatattcatgtgaaaaagggagaaatttatggatttgttggaccaaatggagcaggtaaaagtacagtaatgaaaatgttgctaaatctcgttaagccaaattctggagaaatagttatgttcagtaagaaagtggcagaaactgattttgaaatattaaaaaagattggtactattattgaaaatccttatttctatgagaatttgactgctaaacagaatcttgatttacactgtgaatatatgggttattataacaaagaacatatatcagaggtattggaatgtgtcggattgtcaaagcaatcaaacaagaaagtttcaaaatattctttagggatgaaacaacgtcttgcaatagctagagcaattcttactaaaccagaattattgattcttgatgaacctataaatgcactcgacccagaggggataagagaaatgcgagaattattccgtaagttaaatacagattatggaataactatatttatttctagtcatattctttcagaggtagaacaaattgcggacactattggaattattcaagatggtaaacttattaaagaaatttctatgtcagatatacacaaatatcaaacagattatgttgaagtagatgtagataatgtggaacttgctggatacttgttagaaaaagaatttggaataaaagactttaaaattacttcggaaagttgtattgaaatatatgatttacgaaaagatgtaaaagaaatatccaaaatatttatcaaaaatcaaattggtataaatagcattggacgtaaacaaagttctttagaagattacttcttccaaactacaggtacaggaggtatagaaacactatgatacatttaatgaaactagaattaaaaaaagttgggctaaaaagatattttttattttcaatactggggattttgttatgtatgttttttgtctttactggattgaatgataaatctacttcaatatatgattatgatgttacatttaggacaatcagtttagttttctgtttttactatattatattatttgctgtgttgaatgtggcatatataataaatgaatatacaaataaaacaatcttgattttattctcttatccacttgaccgtaaaaaacttattttatcaaagttacttttgattacgactcttatgatatcatcaatgatagttggatatatctgttgttttacattcgttgttgtgttggataagtattttaatttagttattggagattttcatatttcaattttatcttattggataccaggagcaattaaaagtattattgtattttgctcattaggtatatggacattcgttgttggaatgataagaaaatcaatacctgttacccttgtcagttcaattatttttatcaatttaagacaatttattttagctggtacaaatacaactcaagacagtctgatttctgtttttattatagttggaataactgtgattggtatatattatatactaaatcataaagttactgaaattgactagatactgtggataggaaggtagttattaattgtatcttcttgggataataatgatttgctattatatcagctattattaatattattagagttttaataatattaataatagctatatattttttcttcttatttataaatttaatgatttatagtcataaaatgaactctaagaagagataaaaatgcgttttatatgtttttagattaatatgaaatatcacaatgaaatgttgtacaaagtgatatataataattatatgaactataaaattgactaaacttattgactaataaattagatgaaaagttgagacttactgaaaataaatacaatgaaatatatactacaagtattaaattaaatctgaactttacatactattagaataagtattataagattataatgatttaaaaatattaaaataattgaggtgataacatgaacaattcctttttagataaattgattgagacaaaagaacttaaaaattcactttataatgtgttaaaacacaattttctttatcattctaataagatagagggcagtacttttactactgaagcattagcacttttactcgataagaatgttgttacaggaagacatactttagatgatgtacaagaaactgttaattctagttatgtatttgatacagtaattgactcactgaaagagaaaataacacataatttcttaaggaatctacattcaagtttaatcttcaatacaaccctacattccagagggatggctggtatatataaaactatacccaatatgatactaggaactgatgtaagcatagcacaaccatttgaagttgagccaaagcttgatgaattaattgaatggtactatagtcagagtgaagtgtctattaaagttatagctgaatttcattatagatttgaattgatacatccatttcaagatggtaatggtcgcataggtagatttgttatgctaaaacagatgttagaaaataatcttcctataaaaattgtatcttgggatagtgaggacttgtatagaaactccttaaattcttgtagtttaggtaattatgtccctttaattgaatatttatcaagtttagaagattttagagaagtatataaaatgttatggaaataattgtttgtagcaaaaaaagtttttatataaatatatttttaactatgctatttaacgttgatttcttagttattcttagcttggactatacccactattttaactatataaaatagtggatatagtttaactatctctttataactatttttatgtatcttagttgtttcttaatattgggacagttcataaaactaaaagtgatttttaattttatcatttataatttaccattacatcagaaaaatgcttatcattagaattttcataaaaggtacctattttcttcaattaactaaatcaattctattagtcttaatctttcgtatttcaaattgataatacaagaaaataaaaaataaaaaattttaaattttttatttattgcgaaaaaaataaaaaggtgctatactttttgtaacatattattcaaattattaagagatagtaaatatttatagtttaatttgtagtacactagcatgatttgcagaacaatgaattaatctatagtataatagtttaatttgaagtacaacgatttaatctatagtacactagcatgatttgaagtataacgatttaatctatagtacaataacttgatttgcaatacaataatttaatctatagtataatagcatgatttgaagtataacgatttaatctatagtacaataacttgatttgaagtacaacgatttaatctatagtacaataacttgatttgcaatacaatgatttaatctatagtataatagcatgatttacagtacaataatttaaattgtagtacaaaagtactatcaaataagaatttctactttaaaaatattactaaaagtaattaaaatccaataattcaatataatatggcaaaagaatagaaataaggtgagagtagtgaaagtaaagtcaaatttagatgaaattttatatcataagattattgaaagtcttattcgtggtgaatactctgtaggtcaaaaaatattactaaatgacctttgtgaaaaatttgaagtaagcagaacaccagttgtacaagcagtaaaaatgctaaataaagatggagtgcttactattatgacaaatggtaaagtgtacgtaccagagtatgaatatgatatggtaaaacaagtttgtgaaacgagaacactgattgaaacatatgctttagaaaaaatgatgcaagaagaggaagaggtttttcaacaaaagctagatgtaataaaaagatactctgataaatgcgaggagtactatcgtcaagaaaaatctgtagaacttgcactagcagatttggaattacataaagccattgtagaaggggcaaataatgagattttaaatgatgtatatgttggtatacaaggaagatttatagtagtgaactatttaattcgaccattaaaaaatcgtaattatgaaggaacagtacaagaccattttgaaatattaaaattcattgaagacagagatacaaaaaaagcagtagataaactaagaaatcatattcaaggaactattaaaagattctgtgaagatgaataataagttttgaagttactatatacttatctattaagttgctaaatgtagtctaagtataatctaattatagtttaaacataatctaaatataatctaaatatagtgtaaataagtctaagtatgaattaaatatagattaagtatgaattaagcatggattaaatatactttaaattacaaatattacaaggaagccagaaggcttcctaaaaaaataacctttataaaattttttattttaaatttaaaattttttattttaaatttaaaataaaaaatgaaagaggtggtagagagtttgaaaaaaattactaaagaaaggatagaaaatactatgaaaaagctatttacgagcgaaacatttttggaatatcaatttataagtgattgccaaatatcaccagatggaggatatacagcatttattgtaaaaaaagctgatatcaaagagaatggttacacaagccaagtttatatattaaacaataaaactggcgaattaaaacaaataacgtctataaactctgttggagcatatgtctgggaagatgaaaatactatcttgttccctgctttgcgaaatgaaaaagtaaaagaagctgtcaaaaacggtaagcaatgcatgagttactatgctttatctttaaatggtggagaagcagaagaactttttagactccctatcaaaggtggtaaattgaatcctataggaaaaggtttgtatgcagttattgattcttatgacaatgaccgacctattgtagagggattgccagaagaagaacaacagaaaaaaataaatgcttataacaaaagacattatgaacatttcaaagaaattccttatgctgtcaatggggagggatatattagcagaaaaagaaaacgcctatatatatacgacagtaatataaataagttgaaggcaattacagcacctatgtttaatgttgtaggtatgaaaataagtgatggaaaaatcttatatatagggcaagagtttaaagatgtaaaaggtttgaaaaatggggtctatgtatttgatacaaacacaaacacaaatatctgtatattagaaaaagataagtatattataaaaggttttgaattatatcaaaatcaagtgatactaaacctaactgatgctttatcttatggaaatggagaaaatggagatttttatactattgatattgatacgaaagaaatgaaacttctttcagggcatcaacatcattgtattggaaatacagtaacatctgatgttaaaatgggtgctggtcagacaacaaaggtagatggagaatatatttattacacttctacagtagatatggactgcattattgaaagaatacatattccaacaggaaaacaggaaaaagtaacacagacaggttcagttgattttatagatgtaaaagatggcaatattgtatgtgtgggttgtttaggaaatggattaccagaagtttatacagtagagaatggaacattgtgtaagaaaacacatttaaatgaccatattttagaggaatataaaatttctgtgccagaatacatagagtcaaaaggaagttctaaatgggaaatacaaggatacgtatataaaccagtagattatgaggtggggaaaaaatatccagctgtattggcgattcatggaggaccaagattgacatatggaccatattttatgcatgagatacaggtatttacaagtgcaggttactttgtattcttctgtaacccaagggggtctgaaggtcgtggcaatgcttttgcagatattaggaaacagtttggagatattgattatatagattttatggaatttacagatactgtacttgaaaaatatacagacattgataaaacaaaattggctgttgaaggtggaagttatggtggatttatgacgaattggataattggtcatacaaaccgttttgctgttgcttgtgctcagcgttctattgcaaactggagtagcatggagggtacaacagacattggttattatttctgcaaaggacaaacaggtgcttctcatatggaaaaccacgagcttcaatggaaacagtcacctcttgcttatgctgataaatgtgttacaccgactttatttttacatggtgaaaaagactatagatgctatatgcaagaagcattccagatgttttcagcattgaaaattcatgggtgtcctacaaaactttgtctatttgaaggggaaaaccatgaactgtctcgttctggtagaccaaaacaaaagctacaaagattagttgaaatgctagattggttttctgtgtacataaaaaaagataacataggacagtagaaaggagaatataaaaatggaaaaaataaagattgaaagttcagatatttttgaatatatattccctcatgatatttcttgttcacctgatggaaagcatattgcttatattatatcaaatatcaacgaggaaaaagactgctatgaacatgacttatatgtgatggacatcaaaacagaaaaacaaatacatatgactcaaacaaaagatgtaacatcatttagttggatttctaatacagaactactttttacatctaaaagaaataagccaaaagcaggtacaacagatttttacactatttctatagaaggaggagaagcaaaagaagcattttctattccaaaagcttgtagcgtacctgtatcacttggaaataaattgtggttattgacaacaaaaaatccaacggattctaaaaaatcagaaccagatagggcagtagagggtgtagattattggacatttacagataaaccttttataagagatagagaaaatttttctcaaagaagacgtgtaacattagaattatatcaagaaggtgaaaatataacaaaagccattacaccaaaattttgtgaagtagcaggtatagacgtttcttctgataaaaacagaattttatatactggtcagatttatgaagattgtgcaactcctttttctggactttgggagtatcatatagacagtggtgaaaccaaagaacttgtaccacaaggaaagtaccaaataagtttggcaaaatatattggcaaagataaagtaatgttgcaagcttcaacattagaacgttctatcacacagaatcatgatatttttatacttgatttgagtactagtgaaataaatatgattgctagtccagatggtatgtatgctacattactggatgtagatgcagtatatggtggtggacgtagtaataaagttataggagataaatttattggtgcaagaatttgcagaactatgacagaatttaatgagtttgatacaaagacaggtaatatacgtatcatcacaaaagtagatgcttttacatcttttgatatttacgacaacaccatgtacacagtaatgttgaaagattatgagttagcagaaatatatagcattgatatgactacaggtacaatgaaaaaaatgactgctttttctaaaccatatttagatactcataaggtttcattacctgaaaaattgacgtttgtagcaaaaaataaagaagaagttgatggttttgttataccacctatagatgctaaagaaggcgaaaaatatcctgctgtattgttcattcatggtggacctaaatgggcatatggctatatgtttacacacttgaagcagtgtgtaacatcaaagggaatgtatgtgatttattgtaaccctcatggtggtgacggttatggtgaaaaattcttagaaatggtagaaagatgggggtatgttgactatgagcatcttatggaatttgtagatacttgtattgaaaaatatcctgggattgatgcagaccgcttaggggttgcagggggaagttacggtggttatatgacaaactggataattggccatacagaccgtttcaaagcagcagtttctcaaagaggtattagtaacttgattacagcttctttaattattgactttggggatagaattatgaagcagacttgtggagataagacgccttggaatcatgaggaggttctttggaatcattcacctattaaatatgtgaaaaatgttaagacaccaacattgttcttacatagtgatagggattatagatgttttatgggggatactttccaaatgtttacagcattaaaacagcttggtgtagatacagaaatgtatttgttccatggagatacacatggattgtctagaaatggaagaccatctaatagaattgcacgagcaaatgctattgtagattggtttgaaagatatttataataagggggttattctatgagtgatatgttattatggtttagtgtcgtattagttttatttgctattggggatttaattgcaagcaaaacaaaagcaaaagtatcagctgtatttgttacactacttttatttttgattctatttgtcacaaaagcaataccagctgatattattgaaaaagcaggtatgaccgcagcagctagttggagtgttccaatgattatgtttagtatgggaacaatgttgaatgttaaacaatttatagacgaatggagaacagtattgacagcatggcttggaattgtagcagttatagtctgtgtctcattatgtattcctttgtttggaaaatcaacagtattgacaagcataccagttataaatggagctttacctgctactactattatgacacaagcagcactagaaaaaggactgacacttgcagcagctacagcaacagttgtatttgcaattcagaagtttattggtacaccaatagcttcaagagcagcgttacaagaggcaaaccgtcttttagtagaatatcatgaagcaaaatcaaaaggcattgatttagcaaatgttgatactgataagaaagaagcagagaatacaggcacaaaagtaaaacaagctttctgtgaaaaatacgataaatattattctacaaatgtttgtatattttttatagcactattctcttatctagggtatgaactttcagagattattcatgtaaattattctattgtatgtcttgttgttggtgttattgtaacacgtattggtattgtaccaaaagacattttggaaaaaggaaaaatcaagggatttattaacatggttgtgtttgcagctgttattccttctttagcaaaagtttctttgacagatttaattagtctttttgtaccaattgtgggtatgtttgcagcttctatcattggtatattccttatgatgaaggtgttaccaggttggaaaattatcggttctaaacctcttgcttttggagtagggttttgtcagatgttgggattcccaactacatatttaatttcaaatgaagtgtgtaatgctgttggagaaacggaagaagaaagagcatatttgatgtctaagattatgcctaagctggtagttggtggtatggcttgtatgatttctattgtagtagctggtcttatggtaccaatgttgtagataggtttcatagttaaaaagtggtgttaatttataggagaagctaaaaagtagtattaatttataaaataattttatattagttaatttgttataagaatattttctttttatgattataattttgattttataagagagcagattttttatttgctatgctaatagttataatttgtttttatttgctaaaatgcaactttaatttgatttatgtataatatagggtatttaataatatttttgaagaatttttataaaaaattaaaaagaggagaaaaaagggagtgccacaaagtgaactttttagttctaaggcactcttttttgtacgaaatcgaatatattttcaacgttttaaaagtgagaaagagacttatctctagtttgggatagccaaatttaattattaaaattattttttgttttatttatcaaagagtattcgtgttttagaagttagtattttttattttatatatccaaggttttccgtttctaatgttttcttttttaaaataattagggtattcaattatagtaaaaggtggatggtattttggaatgatattatttaaagcacagtattgaatgttgaaatcctcacattttagagtattatcttttgtaatcaaaaaaatcttctatacttatagcaaggttacttctgcaaatattccatgcatcataatatccaaatttaaatttttttaatatagagtttacctctagtctacactcttgaataactctttcctctatccaaattcttataaactcatcccatttattactatctatttattactatctaaattttttagtatgtttgtaattggaaatggatttattcctttatgttttttataaatagtttataacttaatttattattaaacaaatcattcatacagaattactttttcttttagatattcaattcttacttttaataaatatttaatacattctatcttatgtggttttaaaaagtgtttatggctatcaataatctctaatatttcattcatatttattttgtcatagtaatattttacatcttttatattgacaaaaaagtgctctaagtgtatagtgtgtatataataacatcacactggaggtgataaaaaatgaaagtgctcatttctaacacatcagataagccattataccaacaaattaaagagcaaattaaagaagcaatatttactgaagaactgaaagaaggggatgcaatgccctcaataagaaattttgctaatgatttaaaagttagtattttgactattagacgagtgtatgaagaacttgaaaatgaaggttttcttacacgccaagttggaataggaacatttgtttcaactggaaatttagaaatactaagagactcaaagaggcgtatagttgaacaaaaaatggcagatatgattaaggatgcaaaagcactaggaattacacagatagagttacaagaaatgatgggtattctatatgaggaggattaatatggaaaatattttagaagtttataacttaaataagacttataccaatttttcattatctaatataagctttgtattaccagaagattgtataactggatttataggtgttaatggagcaggaaaaacaacaacaattcgttcgatattggatgtcgtaaagcgtgatagtggaaaaataaaaatctttggtaaagatttcgatggaaatgagaaggaattaaaaaatcgaattggagttgtatttgatgattcatatttctatgaggagttgtcaatgtcagaaatgaaaagtattattgcaccttcatatgataattggtgtgaagaagattatcaacaaaatatgaagcgttttaatcttaatccaaaacaaaagattgatacactttcaaaaggaatgaaaatgaaatttgctttagcattagcattatcgcataaagctgagtttttaattatggatgagcctacaagtggtttagacccactaatccgtagtcagatacttgacatactaacagaatatatgaagaaatgtggtcgtggtgttttcttttctactcatataacatctgatttagacaaaatagcagatatgattgttatgattgacaatggacgtattatattagagcgtgaaaaagatactctattggatgaacatagaaaagtaaaaggggatattcaatttctaaatgatgaaatcaaaaaattatttttaaatttagaaattacaggttatggttttatagggattacctcaaaaattaatgaagtgcaaaaaaatatgccagatattttaatagagcgtcctacaattgaagatattatgcttgcatatattgaaaggagagagtaattatgttgattcatttagttaaaaaagatattctgattgtaaaaaaatatgtattgttgatattgtttattgcaataggaatcccattatttatattatggcgtttacctccatttgcacaaatattgggatttgtactatcaattatattttcagaatttatgctgtgccagtatctattattaaaggagagtcaatattcaaaagcatctgtattactttgttcaactccttatcctagacgtggcttagttcaatctaagtatgttttatttgcaatggtatttatctattgtacattagtttactggattgaaaatttacttattccacaaataggaacttttgacttaacatatattttgattgttttattaataagttctattatttatggagtttatatgcctattcaatacaaattaggatatgaaacaacaaaattctttttcgtgatgataatcatggcttcatcatttgtattaccattaactatagctcacagcaattttgaaattccatttatatatcagtatccatccatgatagtgaatattgtattgttccttttaagtttaattatactgttagcttcaatgtttatttctattaaaatttttagtaataaggagcttgtataaggtaagggggaattttatatgccacatttgccagattgggctgttttactttgtatcttacttccaatagtatataaagcttgtcagatatttaaaagtaaaaaatagagtacatatttatattgccatttttattgagtgaagttagatggtatgaatttaaaaggttacttgaaaataaagttacttggtgtgggagagtaacatcataatattatagattatatgtttcttgtgaatcaatttgtattttttaatagataatatccagtaattttattttccattgattattttcaattatgagtatgattgtgtgtattgtataccatcttttaaggtgtttttaaaaaattatatcgtcaaaatataaatctaaggaatcctataaataaagcttttcaattttagaaaactaataaaaagtaggaagttaataaaaagaagctgtctcaaaatagagataagcttctttttcattgctgaaatgacgaaaatataattgatttaatataaaaaagagtgctttatgaactatttattttgaacagtagatacacttgcactcaatttagttactcctaagctttatgaactaaaagtttattttgaagcctatttttctaaataatcatctatatacagtattgcgtttcttttatttattcataatttattttcttattaaagtttttctatattactttacttttaattttatacgaattatcaaaaataaaatagttattagaaaaaaataaaagtaattgcaaagattgcaattacttacttctatattaattactataccataaaataacaaaaaaatcaagtcgagtaatccttcaacttaagtgatatactaggtattaataatttttaattaataaaatataactagaggaaaatctacattttctcaatttctttaattaaattgacctctaattaagtaattataaggagaaaaattatgaatttagcaaagggattagatgttttaaaaatttcatcaaatgtattcggtgaagataaagttatgtatattcctgtaatctacacagaagatgatgcaacacttattgacacaggtcttccgggtcaaggtgatttaataattgatgctcttaataaaagtaacacgagctttgataggttaaaaaatataataattactcatcatgatatagaccatataggaaacataaattatctaagagaaaaatctaagaataatatcaaagtatatgcatacaaaagtgaagtcagttatataacaggagaagaaactccttttaaactttatatgttggaacaaatggtagataaaattgatgataagatgcttagtatgctaaatgttatggtacttggatttaaatcatcatatactaaagtagatgtgtcattagataaccatgaaaaattgaatctaggtgaggaaatagaagttatacatacaggaggtcacactagaggtcacatatgtctttatttaaaagagtctaaagtacttattgctggagatttgttacaggtagaaaatggagaacttacgcctgttgatgtaatgcacagcaacaaacaagagttaaaagatgctattaaaaatataagtaattatgatatagaaacgatagtttttagtcatggtggattatatcaaagagacataattggaacattgaaaaacctaattattgagtagtactatatgatttacaataatttcttaaattacttaaaattatatctaaagatgtagaatcaaaattaaatataagtaataagaattttgctttaaaattatacttaagtgttaagtatgatacgtagtattacaagtattttagaatataattttttatagtaattttaaggttctacaatacttcagttgaaaaatatttaacagcatagtataataggaaagaaaatattttaaataaactttagtatacaaagtgaagaaaaatatttaaattatatataatattgtagagtgaggtaaaatatttaagttatatatcataatacagagtgaagaaaaatatttagataatgtaccataatacaaggtgagtaaaaatatttaaagcatgtataataatgcaaagcgaagaaaaatatttaaataatgtaccataatgcagagtgagtaaaaatatttaaataatgtgttataatacaaagcgaataagattatttaaagcatgtattataatataaagtgagtaaaaatatttaaatcatgtatcataatataagcagagtgaagaaaaatatttaaataatatatcataatgtagagtgaggtaaaatatttaagttatgtatcataatacaaagtaaagaaaatcatttaaattatatatcataaaaataatatgaaatattgaacactcataatattggaggctttaatattttaattgataggttacattatttataacattaaaaatacaatttacataaaatagacatatgaaaaataaaaaattatataataattatgggaatgaggttctcccttggatgataatatcctaaactgccaatgagctgatgacttctatgatatcatagatgccaccagctttttttgttgtttaaatcgataaaatggaggtgaattacttactaaatttttattttttaaatttgaagaaatatttaattaatagaaaaaacagtagattatatgttaattattttattaagaatgggttaagagtatacctatatcctatcaatttaaaaaacaattatgatagtcattacattgactacagttgatgcaataaaactttcaaaaaatcttatgatgcaaatagaaaggaattaaaatgatagaaaaatttaaaactttaatatggattaaaatgataataagaattaaaagcgtttataaaacatatggtggactatttttgttaggactcataggtataccagttggtgcaattataggtcttatagacaccatatttggaacggttcttctaaaagttacagatattcgagaaacatatccaatgtatctgataccatttttagcagtagtaggagttgttattgcttattgctattttaaatttggaggaaaaagtagtaaaggaatgaatctaatatttgaggtagggcatggagaagaagaaattattcctttaagattggttccatttataatatcaggtacatggttaacccatttatttggtggtagtgcaggacgagaaggagttgctgttcagattggtgcaactttttcacattgggtaggtaaaaggttgcctataaaaaatgcttctagtatttttctagtaactggtatagcagctggttttgcaggattatttgagacaccaatagcagcaatactatttgctatggaggttttggtagctggttcactggagtatcaatcgctttttcctgcgtttactgcttcttttacagcaagtgcagtatcaaaaactttagggttagagaaattttcttttgcactttcttctaaagttgtatttgacttaccaatattttggaagcttattgttttaggaattatttttggaatggttggtggagcatttgcatggtgcctgaaattgtcaaaaagaaaaataggtaatagattaaaaaatcctatgataaggattgctattattggagtatgtcttagtgtattattccttttattttataaaggaagatattcaggtttagggacaaatttaattcaaaatagtttttatggtggagaaatttattcatttgactggctgttaaagtttatacttacaatactgactttgtcagcaggttttcaaggaggagaggttacacctttgttttccattggagctagtcttggtgtattgttagcaggattttttaatttgccaattgaattagttgcagcgcttggctatgctagcgtctttggcagtgctacaaatactttttttgctcctgtatttataggggcagaagtttttggatacagctatttaccttatttctttgtagtatgcgctatttcatatatatttaatatggataaatctatttattcactacaaaaaatttcaacgaaacaataaataaaacaacataatgtatgattataagagaaagaatattagagaaaggatagggtaggaatatgttgacaagtttagctttgatttttttattaggaatggcctcgggaggtatttttgagaagataaaattacctagcttattgggaatgttacttacaggaatcatattgggttcatatgttttaaatttgattgataattcaatactagatatttcttctgaccttagaaagattgcattgattattatattaacaagggctggattatctttagatataaacgatttgaagaaagtgggaagacctgctgtacttatgtgctttattccagctacttttgaaattatcggaatgatagttttagcaccaaaattactaggcgtttctatattggaagcagcagtcatgggtgcagtagtaggagcagtttctcccgcaattattgtacctaaaatgcttaaattaatggaagaaggttatggtacagaaaaaagtattccacagatgcttttagcaggaacttctatagacgatattttcgtaattgtgatgtttacagtattcacaggattggcacaaggaaatagtatatcagctattagttttttacaaattccagtatcaattatattaggtgtaatagttggagcagtgattggaatctgtttagcagtattttttaagaaggttcatatgagagattctgctaaaggggtgttgcttttaagtatctcatttttaatgataagtttggagactgctttagagggtattgtgccattttctggattattagcagttatgaatattgggattttccttcagataaaatatcgtgtagttgcaagaagattgtctgtaaagtattcaaaactatgggttggtgctgaaattctcttgtttgttttggtaggggcaacagtagatataagttatgcatttaaagcaggaattggagctgtaattttaatatttggagttcttttattccgtatggtaggagtattcttctgccttattaagacaaatttgacaataaaagaaagattgttctgtatgattggctatattccaaaggctacagtacaggcagcaataggaggtgtaccacttgcaatggggatagcatctggacaacttattttgacattagcggttctcgctatacttataactgcacctcttggagcttttggaattgatgtaacttataaaaaattattaacttctgtagaaggtaagagtaagtaagaataaaaataaagattattttaagtgataaattatattttggaaaaaactatattattgagtacaatgttagaaaatcatttgagtgattacagaaggtagaagtttatatcggattttaaggcatgtgatgattattagaattgattttgtgaaattgttattgtaatatttaattatatagataaagaagcggagtgataactatgtatttaaaaaaattatcaaaattagagttagttattatgaaatttatttggaatttagatataaaaaccaattcatatgagattattgattatatgaaagaagagcataatttaccagaaaaagtggctttaaaaattttatcaaaattatcaaagaaaagattcttatatgttcaagaaacaggcaagtgtatgtattatacagttgcaataaaagaaaagacatatttagagtttatatcaagaaatgtgcaaaatcttttgaagaataattttataaggaatttattagtatcatttcacgaagaggagctaacagaggaaaagataaagtcgttagaaaactgggtagtaaattgggaagaagcttatatataaatgttattatttttattacaatttagataattttggttttgtaagctctgcaactatttttagatggttgcagagcttatttttattttttattcccttaagcaatacttaaaagtaaacgcatttatatttactaacttcaatcacttctaatacttagattactttttaaaaatattttgatatgtcatctctatagtaatctagaacttgtttctattctttatataaagtttttatgaatgatatatataatattcgttcatttgattaaaaataacaaaatattaaataattctactctgatagtttgttaaaaaaataataaaaaatattaataaacaaaaaaaaaaattatcttaagagaggagaatgttctaaaatataaaaaggtttctagatttcataaaagatactattttagtcttgaaaatatttagtttgaaaagattttaatttaatgattgattaagttaaaaatgtgcatgtaataaattttattttatttattgactaaattataaagtttacataattatttaataattatgtaattgttacttaaaaattgatctattttaaaatctagttataacttcgaaaaagactgaaaattaagaaaaaagaaatataagtataaaaatatatcatatagattttttttattttactttaataaaatgatttgtttttacaatactttattaatataaagtttattgctaaaatactttatttattagaaaaaaattactaattaattattaaaattaatgtatttataatgcgtattttcatataaaatttaatttatttgccgattatataattataatgactgatttaattccaatgttgtcaaaatttttaaataaatcatcattataaatataagagaggatgattttatgcaaaagtctttttatgaattaattgttttagcaagaaataactcagtagatgatttgcaagaaattttatttatgtttaagccattagtaaaaaaacttagtagagttttacattatgaagagggagaaacagatttaataatattttttattgaattaataaaaaatattaaattaagtagcttttcagaaaaaagcgatgctattatagtcaaatatattcataaatcattactgaataagacttttgagttgtctagaagatattctaaaatgaagtttaattttgtagaatttgatgaaaatatcttaaatatgaaaaataattatcaaagtaagtctgtttttgaggaagatatttgttttttcgaatatattttgaaagaattatctggtattcaaagaaaagttattttttataaatatttaaaaggatattctgatagagaaatatcagtgaaattaaaaatatctagacaagctgttaataaggctaaaaatagagcatttaaaaaaataaaaaaagactatgaaaattattttaacttgtaattaatgaatttaaagaaatatttacaatagaaatcaaattttagaattaactttattgtaaaatcaataacttaatctaagaatatcttaatttttatattttatatagaacaaagtttacatatttatttcagacaacgtctttattcaatcgaagagcaaattaatcaactgagtgtcttcaatttaaaatgttaggaagtgaatgtatatgaaaacctaagtagatattagtatattttataaatagaaaggaggatatataaaagagttttagcatttagatgtaaaaatattcaataaaaatattatagtaaaggagaaaattttatgagtttagttaatagaaaacagttagaaaaaatggcaaatgtaagatttcgtgttcaggaagatgaatatgtagcaatattggatgctttagaagaatatcataatatgtcagagaatactgtagtcgaaaaatatttaaaattaaaagatataaatagtttaacagatatttatatagatacatataaaaagtctggtagaaataaagccttaaaaaaatttaaggaatacctagttacagaagtattagagctaaagaataataatttaactccagttgagaaaaatttacattttgtttggattggaggtcaaataaatgacactgctattaattatataaatcaatggaaagatgtaaatagtgattataatgttaatgttttttatgatagtaatgcatttttgataaacacattgaaaaaaactatagtagaatcagcaacaaatgatacacttgaatcatttagagaaaacttaaatgaccctagatttgactataataaattttacagaaaacgtatggagataatctatgataagcagaaaaatttcataaattactataaaactcaaagagaagaaaatcctgaccttataattgatgatattgtaaagatatatctttcaaacgagtattcaaaggatatagatgaacttaattcctatattgaagagtcattaaataaagttacagaaaatagtgggaatgatgttagaaactttgaagaatttaaaggtggagagtcattcaaattatatgaacaagagttggtagaaagatggaatttggcagctgcttctgacatattaagaatatctgccttaaaagaagttggtggtgtatatttagatgttgatatgttaccaggaatacaaccagacctatttgagtctatagagaaacctagttcagtaacagtggatttttgggaaatggtaaaattagaagctataatgaaatacaaagaatacataccaggatatacttcagagcattttgatatgttggatgaagaagttcaaagtagttttgaatctgttctagcttctaagtcagataagtcagaaatattctcatcacttggcgatatggaggcatcaccactagaagttaaaattgcatttaatagtaaaggtattataaatcaaggactaatttctgtgaaagactcatattgtagcaatttaatagtaaaacaaatcgagaacagatataagatattgaataatagtttaaatccagctattagcgaggataacgatttcaatactacaacgaatgcttttattgatagtataatggctgaagctaatgcagataatggtagatttatgatggaactaggaaagtatttaagagttggtttcttcccagatgttaaaactactattaacttaagtggccctgaagcatatgcggcagcttatcaagatttattaatgtttaaagaaggtagtatgaatatccatttgatagaagctgacttaagaaactttgaaatctctaaaactaatatttctcaatcaactgaacaagaaatggctagcttatggtcatttgacgatgcaagagctaaagctcaatttgaagaatacaaaaaaaattactttgaaggttctcttggagaagatgacaatcttgacttttctcaaaatacagtagttgacaaggagtatcttttagaaaaaatatcttcattagcaagaagttcagagagaggatatatacactatattgttcagttacaaggagataaaattagttatgaagcagcatgtaacttatttgcaaagactccttatgatagtgtactgtttcagaaaaatatagaagattcagaaattgcatattattataatcctggagatggtgaaatacaagaaatagacaagtataaaattccaagtataatttctgatagacctaagattaaattaacatttattggtcatggtaaagatgaatttaatactgatatatttgcaggtcttgatgtagattcattatccacagaaatagaaacagcaatagatttagctaaagaggatatttctcctaagtcaatagaaataaacttactgggatgtaacatgtttagctattctgtaaatgtagaggagacttatcctgggaaattattacttagagttaaagataaagtatcagaattaatgccatctataagtcaagactctattatagtaagtgcaaatcaatatgaagttagaataaatagtgaaggaagaagagaattattggatcattctggtgaatggataaataaagaagaaagtattataaaggatatttcatcaaaagaatatatatcatttaatcctaaagaaaataaaattatagtaaaatctaaaaatttacctgaattatctacattattacaagaaattagaaacaattctaattcaagtgatattgaactagaagaaaaagtaatgttagcagaatgtgagataaatgttatttcaaatatagatacacaagtggtagaaggaaggattgaagaagctaaaagcttaacttctgactctattaattatataaagaatgaatttaaactaatagaatctatttctgatgcactatacgatttaaaacaacagaatgaattagaagagtctcattttatatcttttgaggatatattggagactgatgaaggctttagtataagatttattgataaagaaactggagaatctatatttgtagaaactgaaaaggcaatattctctgaatatgctaatcatataactgaagagatttctaagataaaaggtactatatttgatactgtaaatggtaagttagtaaaaaaagtaaatttagatgctacacatgaagtgaatactttaaatgctgcattttttatacaatcattaatagaatataatagttctaaagaatctcttagtaatttaagtgtagcaatgaaagttcaagtttatgctcaattatttagtactggtttaaatactattacagatgcagccaaagttgttgaattagtatcaactgcattagatgaaactatagatttacttcctacattatctgaaggattacctgtaattgcaactatcatagatggtgtaagtttaggtgcagcaatcaaagagctaagtgaaacaagtgacccattattaagacaagaaatagaagctaagataggtataatggcagtaaatttaacagcagctacaactgcaatcattacttcatctttaggaatagctagtggatttagtatacttttagttcctttagcaggaatttcagcaggtataccaagtttagtaaacaatgagcttatcctaagagataaagcaacaaaagttgtagattattttagtcatatatcattagctgagtctgaaggagcatttacttcattagatgataaaataatgatgccacaagatgatttagtaatatctgagatagactttaataacaattcaataactttaggtaaatgtgaaatctggagaatggaaggtggctcaggtcatactgtaactgatgatatagatcacttcttttcagcaccatcaataacatatagagagccacacttatctatatatgacgtattggaagtacaaaaagaagaacttgatttgtcaaaagatttaatggtattacctaatgctccaaatagagtatttgcttgggaaacaggatggacaccaggtttaagaagcttagaaaatgatggcacaaaactgttagaccgtataagagataactatgaaggtgagttttattggagatattttgcttttatagctgatgctttaataacaacattaaaaccaagatatgaagatactaatataagaataaatttagatagtaatactagaagctttatagtcccagtgataactacagaatatataagagagaaattatcatattctttttatggttctggaggaacttatgcattatctctttctcaatacaatatgaatataaacatagaattaaatgaaaatgatacttgggttatagatgtcgacaatgtcgtaagagatgtcactatagaatctgataaaattaaaaaaggagatttaatagagaatattttatctaaattaagtattgaagacaataaaattattttagataatcatgaaattaatttctctggaacattaaatggaggtaatggatttgtatctttaacattctcaatcttagaaggaataaatgcagttatagaagttgatttattatctaaatcatataaagttcttatttctggtgaactaaaaacattgatggcaaattcaaattctgttcaacagaaaatagattatataggattgaacagcgaattacaaaaaaatataccttatagttttatggatgataaaggaaaagaaaatggatttattaattgttctacaaaagaaggtttatttgtatctgaattatctgatgtagttcttataagtaaagtttatatggacaatagtaaacctctatttggatattgtagtaatgatttgaaagatgttaaagtcataactaaagatgacgttattatattaacaggatattatttaaaagatgatataaaaatctctctttcttttactatacaagatgaaaatactataaaattaaatggagtatatttagatgaaaatggagtagctgaaatattgaaatttatgaataaaaaaggtagtacaaatacttcagattctttaatgagctttttagaaagtatgaatataaaaagtattttcataaattccttacaatctaatactaagcttatattagatactaattttataataagtggtactacttctattggtcaatttgagtttatttgtgataaagataataatatacaaccatatttcattaagtttaatacactagaaactaaatatactctatatgtaggtaatagacaaaatatgatagtagaaccaaattatgatttagatgattctggagatatatcttcaactgtcattaatttttctcagaaatacctttatggaatagacagttgtgttaataaagttataatttcgccaaatatatatacagatgaaataaacataacacctatatatgaagcaaataatacttatccagaagtgattgtattagatacaaattatataagtgaaaaaatcaatattaatatcaatgatttatctatacgatatgtatggagtaatgatggaagtgattttattcttatgtcaactgatgaagagaacaaggtatcacaagttaaaataagatttactaatgtttttaaaggtaatactatatcagataagatatcttttaattttagtgataagcaagatgtatctataaataaagttatttcaacatttacaccttcatattatgtggaaggattacttaattatgatttaggtctgatttctttatacaatgagaaattttatattaataactttggaatgatggtgtctggattagtatatattaatgattcattatattatttcaagccaccaataaagaacttgataactggatttacaactataggtgatgataaatactactttaatccagataatggtggagctgcttcagtcggagaaacaataattgatggcaaaaactactacttcagccaaaatggagtgttacaaacaggtgtatttagtacagaagatggatttaaatattttgctccagcagatacacttgatgaaaatctagagggggaagcaattgattttactggcaaactaactattgatgaaaatgtttattattttggagataattatagagcagctatagaatggcaaacattagatgatgaagtgtactattttagtacagatacaggtagagcttttaaagggctaaatcaaataggtgatgataaattctatttcaactctgatggtattatgcaaaaaggatttgttaatataaatgataagacattctattttgatgattctggtgtgatgaagtcaggatatactgaaatagatggaaaatatttttactttgctgagaatggagaaatgcaaataggagtatttaatacagcagatggatttaaatattttgctcatcatgatgaagatttaggaaatgaagaaggtgaagcactttcatattctggtatacttaattttaacaataagatttattattttgatgattcatttacagcagtagttggatggaaggatttagaagatggttcaaaatattactttgatgaagatacagcagaagcatatataggtatctcaataattaatgatggtaaatattattttaatgattctggaatcatgcaaattggatttgtcacaataaataatgaagtattttatttctctgattctggaatagtagaatctggaatgcaaaatatagatgataattatttctatatagacgaaaatggtctagttcaaattggtgtatttgacacttcagatggatataaatactttgcaccagctaatactgtaaatgataatatctatggacaagcagttgaatatagtggtttagttagagttggtgaagatgtatattattttggagaaacatatacaattgagactggttggatatatgatatggaaaatgaaagtgataaatattatttcgatccagaaactaaaaaagcatataaaggtattaatgtaattgatgatataaaatactattttgatgagaatggaataatgagaacaggtcttataacatttgaagataatcattactattttaatgaagatggtattatgcaatatggttatctaaatatagaagataagacgttctactttagtgaagatggtattatgcagattggagtatttaatacaccagatggatttaaatattttgcacatcaaaatactttagatgagaattttgagggagaatcaataaactatactggttggttagatttagatgaaaagagatattattttacagatgaatatattgcagcaactggttcagttattattgatggtgaggagtattattttgatcctgatacagctcaattagtgattagtgaatagataaaaatacgttaaatatatcctcttatacttaaatatataaaaataaacaaaatgatacactacataaagtgttctatctaatatgaagatttaccaataaaaaggtgaactatgatgaatgcacagtagttcacctttttatatttctaatggtaacaaaatatttttttatataaacctaggaggcgttatgaatatgacaatatcttttttatcagagcatatatttataaagttagtaattttaactatatcatttgatacattattaggatgtttaagtgcaataaaaagtcgtaaatttaattctagttttggaatagatggaggaatcagaaaagtagcaatgatagcatgtatattttttttatcagtagttgacattcttacaaagtttaactttttatttatgttaccacaagattgtatcaattttttaagactaaaacatcttggaatatctgaatttttctctattttatttattttatatgaaagtgtaagcatattaaaaaatatgtgcttatgtggattaccagtacctaagagattaaaggaaaaaatagcagttttactagatgcaatgacagatgaaatgaatgctaaggatgaaaagtaagtaatggtagatataataaaaatattaacaaataaaaagtgttatccaaataagaatagctgaaagttatcataattcatgaaactgataatgaaaacgagggagcagatgccaagagacacacaagtattaaatacatataatttcgaagcaagtgttcattactatatggatgacaaggtagtatatcaaacattggttcacaaagatggtgcatggtcagttggtaaaatctattaagctacattagttacagatatcacaaactataatagttaaacatagaaatatgtgtaaattgtgatggaaattattcaaaaacacaaaaatacgtgatgaaggacaaaatgatagagaaaataagtatcaaaccttaataaatgatttaattgatagtttaaaagttataggaaaaatatataaagaaataaaaacattaaaaaaatataagatatgtttacaaattactatcagacaatctccttatctaatagaagagtcaattaactaattgagtatctttaaattgaaatgttaggaagtgatttaaatatgaaaacttaaattataaaaaatcaatattaatttatctttaaaaaatagaaaggagtgtataagatttattttcaaagtttaaaaacaagaaaatcaatttaaatttcagaaggaataaatgtggttatagaagtggatttattatcaaaaataatagtactaggaggtttttatgtctttaatatctaaagaagagttaataaaactcgcatatagcattagaccaagagaaaatgagtataaaactatactaactaatttagacgaatataataagttaactacaaacaataatgaaaataaatatttacaattaaaaaaactaaatgaatcaattgatgtttttatgaataaatataaaaattcaagcagaaatagagcactctctaatctaaaaaaagatatattaaaagaagtaattcttattaaaaattccaatacaagtcctgtagaaaaaaatttacattttgtatggataggtggagaagtcagtgatattgctcttgaatacataaaacaatgggctgatattaatgcagaatataatattaaactgtggtatgatagtgaagcattcttagtcaatacactaaaaaaggctatagttgaatcttctaccactgaagcattacagctactagaggaagagattcaaaatcctcaatttgataatatgaaattttacaaaaaaaggatggaatttatatatgatagacaaaaaaggtttataaattattataaatctcaaatcaataaacctacagtacctacaatagatgatattataaagtctcatctagtatctgaatataatagagatgaaactttattagaatcatatagaacaaattctttgagaaaaataaatagtaatcatgggatagatatcagggctaatagtttgtttacagaacaagagttattaaatatttatagtcaggagttgttaaatcgtgggaatttagctgcagcatctgacatagtaagattattagccctaaaaaattttggcggagtatatttagatgttgatatgcttccaggtattcactctgatttatttaaaacaatacctagacctagctctattggactagaccgttgggaaatgataaaattagaggctattatgaagtataaaaaatatataaataattatacatcagaaaactttgataaacttgatcaacaattaaaagataattttaaactcattatagaaagtaaaagtgaaaaatctgagatattttctaaattagaaaatttaaatgtatctgatcttgaaattaaaatagctttcgctttaggcagtgttataaatcaagccttgatatcaaaacaaggttcatatcttactaacctagtaatagaacaagtaaaaaatagatatcaatttttaaaccaacaccttaacccagccatagagtctgacaataacttcacagatactactaagatttttcatgattcactatttaattcagctaccgcagaaaactctatgtttttaacaaaaatagcaccatacttacaagtaggttttatgccagaagctcgctccacaataagtttaagtggtccaggagcttatgcatcagcttactatgatttcataaatttacaagaaaatactatagaaaaaactttaaaagcatcagatttaatagaatttaaattcccagaaaataatctatctcaattgacagaacaagaaataaatagtctatggagctttgatcaagcaagtgcaaaatatcaatttgagaaatatgtaagagattatactggtggatctctttctgaagacaatggggtagactttaataaaaatactgccctcgacaaaaactatttattaaataataaaattccatcaaacaatgtagaagaagctggaagtaaaaattatgttcattatatcatacagttacaaggagatgatataagttatgaagcaacatgcaatttattttctaaaaatcctaaaaatagtattattatacaacgaaatatgaatgaaagtgcaaaaagttactttttaagtgatgatggagaatctattttagaattaaataaatataggatacctgaaagattaaaaaataaggaaaaagtaaaagtaacctttattggacatggtaaagatgaattcaacacaagcgaatttgctagattaagtgtagattcactttccaatgagataagttcatttttagataccataaaattagatatatcacctaaaaatgtagaagtaaacttgcttggatgtaatatgtttagttatgattttaatgttgaagaaacttatcctggtaagttactattaagtattatggacaaaattacttccactttacctgatgtaaataaagattctattactataggagcaaatcaatatgaagtaagaattaatagtgagggaagaaaagaacttctagctcactcaggtaaatggataaataaagaggaagctattatgagcgatttatctagtaaagaatacattttttttgattccatagataataagctaaaagcaaagtccaagaatattccaggtttagcgtcaatatcagaagatataaaaacattattacttgatgcaagtgttagtcctgatacaaaatttattttaaataatcttaagcttaatattgaatcttctattggtgattacatttattatgaaaaattagaacctgttaaaaatataatccacaattctatagatgatttaatagatgagttcaatctacttgaaaatgtatctgatgaattatatgaattaaaaaaattaaataatctagatgagaagtatttaatatcttttgaagatatctcaaaaaataattcaacttattctgtaagatttattaacaaaagtaatggtgaatcagtttatgtagagacagaaaaagaaattttttcaaaatatagcgaacatattacaaaagaaataagtactataaagaatagtataattacagatgttaatggtaatttattggataatatacagttagatcatacttctcaagttaatacattaaacgcagcattctttattcaatcattaatagattatagtagcaataaagatgtactgaatgatttaagtacctcagttaaggttcaactttatgctcaactatttagtacaggtttaaatactatatatgactctatccaattagtaaatttaatatcaaatgcagtaaatgatactataaatgtactacctacaataacagaggggatacctattgtatctactatattagacggaataaacttaggtgcagcaattaaggaattactagacgaacatgacccattactaaaaaaagaactagaagctaaggtgggtgttttagcaataaatatgtcattatctatagctgcaacggtagcttcaattgttggaataggtgctgaagttactattttcttattacctatagctggtatatctgcgggaataccttcattagttaataatgaattaatattgcatgataaggcaacttcagtggtaaactattttaatcatttgtctgaatctaaagaatatggccctcttaaaacagaagatgataaaattttagttcctattgatgatttagtaatatcagaaatagattttaataataattcgataaaactaggaacatgtaatatattagcaatggaggggggatcaggacacacagtgactggtaatatagatcactttttctcatctccatatataagctctcatattccttcattatcagtttattctgcaataggtataaaaacagaaaatctagatttttcaaaaaaaataatgatgttaccaaatgctccttcaagagtgttttggtgggaaactggagcagttccaggtttaagatcattggaaaataatgggactaaattgcttgattcaataagagatttatacccaggcaaattttactggagattctatgcctttttcgattatgcaataactacattaaaaccagtgtatgaagacactaatactaaaattaaactagataaagatactagaaactttataatgccaactataactactgacgaaattagaaacaaattatcttattcatttgatggagcaggaggaacttactctttattattatcttcatatccaatatcaatgaatataaatttatctaaagatgatttatggatatttaatattgataatgaagtaagagaaatatctatagaaaatggtactattaaaaaaggaaatttaatagaagatgttttaagtaaaattgatataaataaaaataaacttattataggcaatcaaacaatagatttttcaggtgatatagataacaaagatagatatatattcttgacttgtgagttagatgataaaattagtttaataatagaaataaatcttgttgcaaaatcttatagtttgttattgtctggggataaaaattatttgatatccaatttatctaatactattgagaaaatcaatactttaggcctagatagtaaaaatatagcttacaattacactgatgaatctaataataaatattttggagctatatctaaaacaagtcaaaaaagcataatacattataaaaaagacagtaaaaatatattagaattttataatggcagtacattagaatttaacagtaaagactttattgctgaagatataaatgtatttatgaaagatgatattaatactataacaggaaaatactatgttgataataatactgataaaagtatagatttctctatttctttagttagtaaaaatcaagtaaaagtaaatggattatatttaaatgaatccgtatactcatcttaccttgattttgtgaaaaattcagatggacaccataatacttctaattttatgaatttatttttgaacaatataagtttctggaaattgtttgggtttgaaaatataaattttgtaatcgataaatactttacccttgttggtaaaactaatcttggatatgtagaatttatttgtgacaataataaaaatatagatatatattttggtgaatggaaaacatcgtcatctaaaagcactatatttagcggaaatggtagaaatgttgtagtagagcctatatataatcctgatacgggtgaagatatatctacttcactagatttttcctatgaacctctctatggaatagatagatatatcaataaagtattgatagcacctgatttatatacaagtttaataaatattaataccaattattattcaaatgagtactaccctgagattatagttcttaacccaaatacattccacaaaaaagtaaatataaatttagatagttcttcttttgagtataaatggtctacagaaggaagtgactttattttagttagatacttagaagaaagtaataaaaaaatattacaaaaaataagaatcaaaggtatcttatctaatactcaatcatttaataaaatgagtatagattttaaagatattaaaaaactatcattaggatatataatgagtaattttaaatcatttaattctgaaaatgaattagatagagatcatttaggatttaaaataatagataataaaacttattactatgatgaagatagtaaattagttaaaggattaatcaatataaataattcattattctattttgatcctatagaatctaacttagtaactggatggcaaactatcaatggtaaaaaatattattttgatataaatactggagcagcttcaactagttataaaattattaatggtaaacacttttattttaataataatggtgtgatgcagttaggagtatttaaaggacctgatggatttgagtattttgcacctgccaatactcagaataataacatagaaggtcaggctatagtttatcaaagtaaattcttaactttgaatggcaaaaaatattattttgataatgactcaaaagcagtcactggatggaggattattaacaatgagaaatattactttaatcctaataatgctattgctgcagtcggattgcaagtaattgacaataataagtattatttcaatcctgacactgctatcatctcaaaaggttggcagactgttaatggtagtagatactactttgatactgataccgctattgcctttaatggttataaaactattgatggtaaacacttttattttgatagtgattgtgtagtgaaaataggtgtgtttagtggctctaatggatttgaatatttcgcacctgctaatacttataataataacatagaaggtcaggctatagtttatcaaagtaaattcttaactttgaatggtaaaaaatattactttgataataactcaaaagcagttaccggatggcaaactattgatagtaaaaaatattactttaatactaacactgctgaagcagctactggatggcaaactattgatggtaaaaagtattactttaatactaacactgctgaagcagctactggatggcaaactattgatggtaaaaaatattactttaatactaacacttctatagcttcaactggttatacaattattaatggtaaatatttttattttaatactgatggtattatgcagataggagtgtttaaagtacctaatggatttgaatactttgcacctgctaatactcataataataacatagaaggtcaagctatactttaccaaaataaattcttaactttgaatggtaaaaaatattactttggtagtgactcaaaagcaattactggatggcaaaccattgatggtaaaaaatattactttaatcctaataatgctattgctgcgactcatctatgcactataaataacgacaagtattactttagttatgatggaattcttcaaaatggatatattactattgaaagaaataatttctattttgatgctaataatgaatctaaaatggtaacaggagtatttaaaggacctaatggatttgagtattttgcacctgctaatactcataataataacatagaaggtcaggctatagtttaccagaataaattcttaactttgaatggcaaaaaatattattttgataatgactcaaaagcagttactggatggcaaactattgatagtaaaaaatattactttaatcttaacactgctgttgcagttactggatggcaaactattgatggtgaaaaatattactttaatcttaacactgctgaagcagctactggatggcaaactattgatggtaaaagatactactttaatactaacacttatatagcttcaactggttatacgattattaatggtaaacatttttattttaatactgatggtattatgcagataggagtgtttaaaggacctgatggatttgaatactttgcacctgctaatactcataataataacatagaaggtcaagctatactttaccaaaataaattcttaactttgaatggtaaaaaatattactttggtagtgactcaaaagcagttaccggattgcgaactattgatggtaaaaaatattactttaatactaacactgctgttgcagttactggatggcaaactattaatggtaaaaaatactactttaatactaacacttatatagcttcaactggttatacaattattagtggtaaacatttttattttaatactgatggtattatgcagataggagtgtttaaaggacctgatggatttgaatactttgcacctgctaatacggatgctaacaacatagaaggtcaagctatacgttatcaaaatagattcctatatttacatgacaatatatattactttggcaatgattcaaaagcggctactggttgggcaactattgatggtaatagatattacttcgagcctaatacagctatgggtgcgaatggttataaaactattgataataaaaatttttactttagaaatggtttacctcagataggagtgtttaaaggacctaatggatttgaatactttgcacctgctaatacggatgctaacaatatagatggtcaagctatacgttatcaaaatagattcctacatttacttggaaaaatatattactttggtaataactcaaaagcagttactggatggcaaactattaatagtaaagtatattactttatgcctgatactgctatggctgcagctggtggacttttcgagattgatggtgttatatatttctttggtgttgatggagtaaaagcccctgggatatatggctaaaatatatgtttgacaaaaaattattcctgtgatactcagaaattatttttatataataaatattgagatttaattaaaagtcatgtgttattgtaatacatgacttttagttaaaatttttctatcatttaataatctattattcttgactattttataataaaattcatatatggaaatattaatactaaataattaatagttgatagaaaatagataatatgctaaaagcaaaaactaatttagagccttgtaactgtttatttgcaattataaaaacatctttaaacatattgactataatataaaatattaactataatacaaaacaatattaattaattttctctacagctatccctggtatggttatttttccacccatagttgattcataagttatagttccagcacttatacctcttatagttatgtaatcatcctctaacactcttgaaggagttattgattttttataactacatagtacgaccttatcataatttccagacacagctaatcttatttgcacctcatcaccatcttcaataacttgaataaccttaccttcaaattttacctttttgtacttataatcatcaggtgttctagctaattggtcataagtaataccagtatcatatcctttcttctcttcttcttcttttttacgttgttcttcagcctttttagcttcttcagctttacgttgattttcagcttcaatagctttcttttcgtcgtctttcattttgaaccatggttcagcatcagacaatttgctatttaaagtttctatttctgttttttgagaatctataactgatgtttgattagaaatgacctcctcatggtcttcagaacaagctggtgaggatatattgccaaaaaacacaccaaaataaatgccagtagagcaatatcctttgtgctcttaaagaatttaattattttcttagagcttccttttctttcattactaaattcgttaccctcattttttttagaaaacataatacaatctcccttttattagatatattttattttaaaatttaaaaacttaaaataactagttgactaaaaattatatattcatattttcctaaaatatatttcccctaagcataattttacaaaataaatcaagaagattcaatatattttgaaaaatgaggtaaaaatgtcagattataatataattttcttgaaggtgaattttatatattaaatgaaacataaagtattttatttgtataaaactatattatgatgtaattaaatgattcagtactttagaggtggtaaaatatagatagatgaaagagcataaataaagtgatataataaaaaattaaatattaactataataaaaaaatatctggtactaagtataatacaaaaataatatatcagaaagaaggtgaagtatgggagaactacaaaaaattccaggggtagggaaagcaacagaaaaatctttaatcatgttaggatatacaactattaaatcacttaaagatgcaaacccagcacaaatgtatgaaaaggaatgtttaatgcgtggacagcacatagacagatgtcagttatatgtatacagatgtgcagtatattttgcatcaactgaaaatccagaaccagaaaaattaaagtggtggtattggaaagattaaaaaatcaaaaaagttagatataaaaaagagttgaatatccgtttaaataataaaaactaatactcaactcttttttagtcgtaaattttatgtaaatctatttgtatggctaaatatacccatcaataaatgtataaatataccaatcaataaatgactaaacatactacctaacaaaggattaaataaattacttaacaaagcattctaaaacaattaattagaaactgtttcttcaagccattttctacattgcccaatatttaccatagggtcaaagccttggtcttttcccttatttaaaagcatatcacaagggaaagtatcacattcaccacaatgattaagttccttactttcacagcaagttttaaccttacattctccaccccaaaatggtttttccatagttgggcaaccagtgcaatttacttgttctttttttgtacaactgtcacaacagacaccacatcttgattcaaacatgttcaaacatcctttccattatttaaaaatattataaaatgattttagatgactacaaaagtgcaaatagttgattttaagtcatctaaatgttaaacataaaattattaatactggtaaatttataaaaactattccaaaaatatttttgaatatttcaaaacacaataaattacttcaaatccctttgaatattccataacactatagattactttaaatccccttgaatatatttcacagcattatagattgctttaaatctctttgaatatttcataacactatagattactttaaatctctttgaatattctacaagactatagattagtttaaattcctttgaatatttcataacatcataaattagtttaaatctctttgaatattctacaagactatagattagtttaaatccctttgaatatttcataacactatagattactttaaatttctttgaatattctacaagactatagattagtttaaatccctttgaatatttcataacaccatagattactttaaatccctttgaatattctataacactataaattacttttaacttttatataaccataaagtttttatctggcactttaaatggagtttttatatcaaatttgccttccatcgaataaccaaacttaatttaattacacattccaagagtcaaatattcattcaatatatttgataattctatgttatagccataattaaatatagattattaaagttaaatatttatttaatgtattgaatgattttttagctatatttaattaagtttcattatataatataaaaattgtttttgcattaagttttaatataacacataataattttaaataataacattattatatatttttttattttaggagtatatctattatatagtgagtagataaaacatataaaattcaaataaaagatatatatttttaaataaaagggatataaatttcaaaccaaaaagaatataaatttcaaaccaaaaaatatctagcatttaccattaagaaataacatcattctttctaaaatttctattggcaatttcagaaaatactatagtagtaataaatgcaacacatattgtaactatagtgtcattaacatttaaagcagattgctttataacccccatagcactacctaacatagaataagggaaaaatataccaacagcaggttttgctactattaatcccataccaaatagagaaaggcaaagactaataccaataggagttgcaaaacttctaatctttatagacatgtataattgtatagaagctattgaaatagaaataatccaacctttagcaatccaaccagtcaattctttaggtacactaccagaaaaaccaaacatatttcctgcaactatataaaagataacaaagaaaacttgtgtaatagctgtaagtattgaaactactgtaagtttagataaaaagatattttttaaattaactggcagtgtcattacattattccaattatgattcatatgttcaagcctacaaatatatgcacaaaagattgcgattaagataggaaagaaaaattccccataaaaaagactaacttgagtccataagctgtaccattcttttttgagtatgccttgatttagataaaaattaccagaaccaatcaacacacttataagtggcaaagctaataatacataccatataaaagaattttttaactttagaatttctcccaaaactgacttccttaacatttaaatccctcctatacttctttttttaataaatgatttcttccaatataataaattagcattccaattaagaaaactaaaatcgtaatagaaaaattcatatcaattctatagacagatgaacctaaaacattatcataagcataacttaaaggtgataactctaggtaataagaccatataaacaatctacgaataccttgataaaacaaacctgatgtcaaacctataaaactaccaatcatgccaaatgtaattgcaatcatttgatttggaattacagttgcaatccataggtgtagtgcaatgatagcaatacttacaagaattgttcctaatgtgtattttaaaagtaaagatacagaaattgactcaataacccctctaaaatgtccaaacaacacaatagataacacttgcatcaatataggtatagataccaaaatagcagaacataaaaatttggataaataaatactatttaaagatgtcacagaagattttaaaagcttccatgtatctcctttatgttctatatcgcttatgcgtgatgtaattattgatattaagataggaaagaatagaccatttaaacttgcaaaactcataagcatataggaatattcaaatccacctaacatatctggattacgtgtaatagccctatttgaatttacgatacaccacattatttcaacagctacaaataaaaaggtcatcagaataatcttctttcttttaagtttataaaattctagaccaaggtatttcattataaagtcaccgccttaccagtaagttctaggaatatatcttccaagctttttttatgttcttctattctaaatacatctatatttgaatggacaagcataccatttattttagccacatctgagtcttttaaattttcaatagtcaagtacccattttgtataagtgacatatatcctttagtatttaatagcttttgtgcagatacaacattcttagctttgatagcaatctgactttgacctctattatgaagttcttttatgctatcttgaaaaaccagttcgccatgatttattattcctattgatgtggcaatttggtcaatttcacttaaaagatggctagagattagaacagtcatgccgtatttttctggtagagattttattaattctctaatttcctcaatccctgctgggtcgagtccatttgtaggttcatcaagtattaataatttgggaaacttcattattgccatagcaatgccaagacgttgcttcatacctaaagaatattgattaacttttttatttttttgattttctaaccttacaatttttaatgcttcatttacattttttttaggtaaatctaagagtctttgcattatggtcatgttttcaagccctgtaagatgaccatagtatgatggagattctatcaaagaacctatatcttttaaaattgatattctatttttttcatttaactctttacctaaaatattaatatttccttgtgtgggtttagcaagtccaagaagcattttaagagtggtagattttccagctccattaggacccaaaaaaccatatacagctccttgtggaactcttaggtctatatcctttactctaaatattttattgtattcctttgaaagtctttgtgttctaattatcatttccatatgtttcatccccttttttaatctgtgcttattgattcttttaacttatatcagtataataacttggttacatttcagttagctgaagtttaccttacaataaccttaaaagtctatttaggcaaagttgtgaaaatgggtatatggtatactaaaggagggtgatgattatggagtcaataaaagataaaaaaatacttgtggttgatgaccacaaggaattattaaaaatgatagatgaaatcctaagaaaagagggatttagtagagtatttttagcatcaagttatgaagaagctgttagggtatttagaaatgtaaagccagattgtgcaattttagatgttgtattgccagatggagatggtttctctattatgagaaaaattagagagacatctaagataccagttatttttctctctgcaagaggtgaagatgaagatagattgattggtttgggattaggggctgacgattatatagtaaagccatttttaccaaaggaacttactttaaggcttgtgggtatattaaatcgtgtatatgtgcctatagaagaagaggagttgccagtatttaaactgggagattctgttgttgtgaatttaaatagtgcatgtgttgagaaagatgggcaagagatttctttaacagctaaagagcattcgttgcttttaaagttgtatgaaaataaagggagaattgttactaatgattcactatgtcaagccatttggggagatgatatgtatggatatgaaaatacccttatggttcatgttagaagggttagagagaagatagaaaaaactccatctacacctaaacatcttattacagtaagaggtcttggatataagttgatgattaattaattttagatattagaataaaagaaatcaagaggagtgatttaattttggatagtgtaaagtacatattgaggcgatttataggttcaagtatcttgatttcattactttttattgtattaaatatagcaggttttcttctgttttcatatatgctatttgtatctaaatactctgataatttagatacaagtgatagcagagaaataaaatcaaacttgattatgattgaagataatttgattttaaaagatggaaagtttattttagatgattctagtaaggaagtactacataaaaataaagtttgggcaatgttaattgataacaatggagatagaatatggggatttgatttaccaaaagaaattccaagtcattatactttgacagatgtagcaaagttttcaaggttctttttaaaggactatcctgtgtatgtatgggaacatccaaatggaatattagtaacaggttatccaaaggacaaatacactaaatttaaccttacttatacgattaaggaaatagaacaatttcctatgttaataataggtatgtttctggttaatgcaatagttacttttttaatagctctattcataggtttaaaaatggtgaaatctataaaaccaattattactggcataaagcttatgtcaaaaggagaaccagtacttttacaagaaaaaggaatactaagtgatatttcaaaatctattaatactgtatctaaagagttgcaaatgaaagatgaaaaacttaggaagaaagaggaagctaggtctaactggattgcaggaatatctcatgatataagaactccactttcaatgataattggatatgctggagaacttgaagaaagcagtagcctttcaaatagagaacaagagcaagtgtctattatatgcaatcaaggggttaaaatcagagaattagtaaatgacctaaatttagtatctaaacttgaatataatatgcaagcattgaattgtgataagattagagtttctgcgtttttgagagagcttatttctgagtttataaataataatttggataatgacttttatgttgaacttgatatactaaatgaagatattattatagatgcagataaaaaattattaaaaagggctattagtaatttaatacaaaatagtataactcataaccaacaaggatgtaatataagggttacctctaagtctgatttagatttttgctatataattgttgaagatgatggaaaaggtatgagtcaagaaagaattaatagtttattaaagagccaaaatggactaagtgaggcatatgccaaaggtcaaaatcatggtctaggtattttgatagtagctggaattattaatgcacatagaggtaaattagatattatgagtattgatagtcagggactaaaaacaatactaaaattacctctaattaagtgatattttataaaataataacagataagaatgaagaatgaagaatgaaaatattttgaaaataattttattctttattgacaaaataactctattagagtagaataaggataaattcttttcttgtcaagttttattaaagtaaagagtaacttgtgctttatgcgcttatggctgagttactcatggtatcaaaattttcatagaaataatattttggaattattgtaaggttattaaattctttagataattccattttttttattttttagttaatatttaattttattattgacaaaaaaattctactaaaatagaattatggtatagtgttttttaattttaagaaaaaatataatgacatcctaaaaaagttttaattatacgttgttctgtgtagttataatagcttctatgtaactattgtaagtatattttattataattatttatttaaagtacgataaatgttttaaattgaagtattttgcaccattgagttctactaaagtagagtttttgtgtagtatttttagaaataacatatatatatatgtatttatgttgaaatatatgggaaatttataatataattaatgaaaaaatttaaattttgtaatatataaataaaaaaactctaaaatagaaggatataattatatagaatgtttcaattaaacaaggcaaaaactataatcttaaaattaaaattaacattattcttaagaagtaagaaatttaagaagtaaaaagtttagtgataagtggtagtaagcaagaaatttagaaagtaggaagtttagtgataagtggtagtaagcgagaaatttagaaagtgggaagtttagtaataatttgtagcaagtaagaaatttaggaagtaggaagtttagtaataatttgtagcaagtaagaaatttagggagtaggaagtttagtagtaataatttgtagcaagtaagaaatttagggagtaggaagtttagtaataatttgtagtaagtaagaaatttagaaagtaggaaatttagtaataatttatagtaagtaagaaatttagaaagtaggaagtttagtaataatttatagcaagtaagaaatttagaaagtaggaagtttagtagtaatttatagtaagtaagaaatttagtaagtgagaagtttagttataatttatagtaagtaagaaatttagtaagtgagaagttcagtaataagttgtagtaaatgaaaagtttaggaagtaggaagttcagtaataagttgtagtaaataaaaaatttaggaagtaggatttactgaaatacaaatatttaaaatcaaagagtttaaaagaaaggagagctactggacaagtatccaaaatagatagctgagtacaaaatatctcataaaattaagcaatataatacaagagaattttgacattatttatatatatttaccgtgtacaaatagctaaatttaggattaagattgaaaaatatcttataagtctgagcttatataaatccgtataagatgtatttaatcgaaaaattttattatggatattgcttgtctatattctgagtagcaaggttttatcatgactataaaaaagttgccacaatcagaattaaagataatgaaatttatatggaaatcagattccaaagtaacatctagagatattgttttaggaatggagcaaaaatatcaatggaaacaaacgacaactttgactcttttatctagattagtagtaaaaagatttctaaattctcaaaagatagataaatatacacattatgaagttttaattaaagaaaaggaatacataggagttgagacaagagatttttttagaaatattcatgattcttctataaaaagtttattgttgtcattacatgaaaatattaatttgagcaaagatgatatcttacttattgaagagtggataaaaaatctaaaagaagaggagaaagacgtataagcaaacgtatttcttatagcattaatataaagtgtatgtaagtgtatttatgtaatatattagtctacttaagtaatatgacaaatgattataagtggattatgatactataatgtgaatctaaataaattaaatataaattgatagtggatattctatttaattaaatttaaaaagctacctttacttataagtataattaaggtagctttttaaatagaggtagtgtgattaaagagaatttttaaatataaattgtgaagctttaatatagatgacaatatatattttgcaaatatgacacagtgttttcgtatttaagatgataaaataaataggaattaatgaagatatttaaaaaataaaaataaagaattaatagaagatattaaagagatagagataaaagtgttaatagaagatattgaaaaagtaaaaataaaggattaatagaagatactgaagaggtagaaacaaaagtgttaatagaagatattgaaaaaataaaaacaaaagattaataaaaggtactgaagagatagagataaaagtgttaatagaagatattgaaaaataaaaataaaagattgatataatatactgaagaggtagaaacaaaagtgttaatagaagatactaaaaaagtaaaaataaaggactaataaaaggtactgaagagatagagaaaaaaatgttaatagaagatactgaaaaaatagaaataaaaaattaggaggaaaatttatgaaatatcaggtttcattattagcagtgaaggatattgaagtatcaaaaaaattttacaaagaattatttgagcaagaaattgaattggacttaggcaaaaatgtaacatttaaaggaggatttgctatacaagaagacttcgcatggcttacagggattaatccagatacaattatacaaaaatcaaataatatggaactttattttgaggttgatgattttgacgaatttattgaaaaactcaattattataaagatgtagagtttgtccataagccactaaaacatgaatggcaacaaagagtagtgcgtatttatgacccagataagcatattattgagataggagagtctatggaagttatagctagaagatatttatctgagggatactctgtagaagaaacttctaaaataattcaacatccaattgaatttgtaaagcagtgtgaaaatagtaaggaatgattgtttaaattataattatttagtagaaattaattgtagtggaactaattcaagataatatataggactagtatttgacaaatgtcataaattaaattaaaataaagaaaatattaataaagaaaaataaggggaatattaataaagaaaaaataaatataatattaaaatatattaataaatttgaatatttataatatttttaatttgaagtaggaatacttaaacgtataaagtttattatcggaaatttctatattaatatgtagtaattcaatattattataaaggagtggttattattaaggcaattgaactttataaaaaattagatttagaatttaatattaaaaatattaatgatgattggagttttatgaattttgaaaatgattttatcactccagaatttagaaaaaagtacatatgattagtattagataatgctcaaaatattaataaagtatacacaactacttttcctgataaagaaataattaagcaagttatagataaagatgaaaaagatattttaattttttcacatcacgcaatgggatacatagcatcagatgaaggttttccatttcacgacataccactatcttatatggaagagatgaaaaatcgtagaatttctttttatgtattacattctccactagacaactatagtgactattcaacttctgttagttttgcaaaagctatgggtttagaaatagtcaaaccattttgtaaatatgacgataaaattgaggtaggagttatatgtaaaacatcactaaaatcaatagaagagattaaggaattaattaaaaaatctgttggtcatgatgtgaaattgtatgattatggagattctgtattaaaagatggtttagttgctattgcagcagggggaggaagttatccatttgtagcaagagaagttgctgaacttggtataaatctatatattactgggtttactaagcctttaaaacattttgaaccagtattagagttccatcaaatagcaaaagataatttaattaatgttataggtgctactcattattctacagaaaaatttgcgtgtatgggcatggttgattattttaaaaatctaggtttagaatcagagtttttgcaaggaaaatattacttagaggatttataggacatattaaacaataaaaataaacagttagtaaaaatttattttactaactgtttatttttttacctatttatccagtgttttgaaaaaatctatctttattttttaaactaagaaaatagacttttaattgttgattagaagatttagttttgatgtcttttaaattatttttcgatattttttagtttattttttgatgtattttagattattatttaggattgattagaatttataaatatttattttagattattgtaaatatttatttaaaaaaaatagaattattatatttatgataataaatggtataataaaaggtaaagtgtcaaatatgcactaaattaaataagttaattagtatataggttaaagtggaagtaattaaaacttattaagtattagaaaatgacttcttattagagtaagtatctaaaatgatataaaaattatgattactcattaaagtgactattatagagtagataaaattgcccataaaaatagctataatagagtggataagattactcattaaagcaattactatagagtagataaaattactcactaaaataactataatagagtggataagattattcattaaagcgattactgtggagtagataaaattactcactaaaataactataatagagtagataagatactcattaaggtgattattgtagagtagataaaattacccatcaaagttaattatcacatattagataagattattcattaaagttactatcacagagtggataaaattacacattaaaattgtctgttaaagaatgaataaaaaagagattgctcaatataagaagcatataaaaaatcaaacatataaaatttaataaataataactgatagggaaaggaaagatagaatgatatttacaaaaagcaataaatacgataaggactttctcatgaaaaatatgatgggacctaattgtataaaaatattggaagaattaacaagtaagataaaactagaaaagggaatgcgtattttagacttaggttgtggtaagggtatatcttcgatatttttagcaaaggaatttgatgctactgtatttgcaacagatttatggatagaaccaactgaaaactataaaagatttaaagagtttaaattggatgataaaatatttccaatacaggcagaggcacatgaactaccttatgcagaaggtttctttgatgcggtgataagtatcgattcttatcactattttggaaacaaagaaggatttttagacaatcatatatcacctcttgtaaaagaggggggaatacttgctatggcaatgcctggattaaaagaagattttgtggattgtataccagatgaactcattccattttggcaagataatatgaacttccattcaattacatggtggaataaactttggtctgaatcggagtctgtgattgtagagaaatgtgaagctttaaattgtcatgatgaagcttggaaggattggataaattgtgataattcatatgctataaatgacaaaaaaatgatggaagtagagaatggaaagtattttaatacaatttctttgatagcgagaactaaataattgtgatgaatttataaaagtataagataagtagaaatataagttgaatgagagtataagaagcatagaaatataagttgaattaaagtagaaggtaaataaaaatgtaagttaaataaagagtttatacaaaaatgattttttagattatttatacccaatcgagttgcttaggtcagttgggtatttttatttttttaaagttaaattgcaaatactattgtgtgatatatattttaatactaaatgtttgttttataagaaataaactaatagaaaaaatagttttaacaatgaaagcaaaaaaggtattgatgaagattaaaaattttatagtaccattttatatatttttttatatattttattatactttaaatcaaatttcaaaatgattaagtatatatacccaaaagattaaagaactatatttattatactattaaaaattattttaatagagatacaagagatagatatattggttttaattttatagaaatatacaaagatattttaagctaatatatagtaatttatatagcattataaactagaatcatataaaataagttaactacaatcataaattaaaaaggagaaatgttaagttgatagaaggaataaaatttataaaggcagaagaaaagtatatttattcgtattggcaaacttttgataaaatagcaaaagagaggaaatatctagctatggatgaagcctttccttttgaagaaacagttgaatttataaaaaatactataaataaaaacttaccacaactgtttataattgatttagaatcagataactgtattggttggtgtgacgttttacctaaaactgaaaaagttggttatttaggcatgggtattcttaaagagtatagggaaaaaggtatcggaagtagtcttttaaaacaaattattgatttatcaaaagaatatgggtatgaaaaaattgagcttgatgtatttaaaagtaatagtagagctattcatgtttataaatctttagggtttgtagaggtaaatacaatatctagtggttttacatggaatgatagacctgtaaaagaagaagtaattcaaatggagcttacacttatataaaataaagttaaagtctttaaaattccatatacacttgtataaaataaagttaaagcccttaaaattccatataaaagaaatatttttaagggctttttaataatggttcttttgaaggtagctaaatatctaaaattttatatattaaatttaaagaaaatataaagatggaagatacaaccatgtttactaataaaaaaattaaagtcataaataataaactcataaacaacttattattacttatgtttattttgcatctattacttcatgagccattttaactaagtcattcatagataaatttgagtcttgaactgtaaaagaatagtaaactccatcttgtttccatgtcaaaaacttaaattcattaacttcaactttgtctgattcattatttggccctacactaaatgtgtatttgcctgatttttcatcaattttatcctgttctgtcattttataaccttctggtacaaacttttgtgcgaatgcttcataagaaatattaatatctttgtaagtatctacaacttttagattgtcagaactcttctcaagtacattatttgctgtgtcaagagatatttcatcattgccatttttatattcaaaactaagtgcttttgattttcctaaaacattattttctttgtcaagtgcttttttatttacagtatatgctcctttaaatttatatccattactaaattcagaaactatattaggggtaaagttaaagtctttttttacttgttctgtagttgggatagatgtataggtagccttagtacttgattttccaactaaactatatatatgtcctactgcaagggctgttgtgctcaatatcaaagtaatggctaaagttgcaactaagccttttctaaatggtaatttgtgtgttttattattaatcattttataattttcctctctttctggtaaactatttagtgttttacttaaactattatgaaaactttctggaacttctggaaacgaattatttaatatatttttattcatatgattacctccgtgttttctaatttagtttttaataatgttcttcctcttgataatctactttttacagttccttgaggtatatctaatatttccttaacctcatctactgaataaccttcaatatagtaaaggactattggaattttaatttttttaggtagactttgaatagcagtatacaaatcgctatagtcatctttttcatcaatttttttgtttttgaagacatcttcaaatgatagagattttaatcgtttgcgtcttaatgaattacattcatttatgactattctaatcagccatgttttaaagtattgttcttccttaagagaatccaacttttcatatgcttttaaaatagcattgttgacggcatcttcacagtcttggtcgtttcctagaatagacttagatactcgatacaaagtctgttctgattcaagtatattgtttgtaaatgtagttttatccaactgagttccttcccttctatgcaaatcgtagcgctacttttttgcctttcacttattagataaaattttactatagatggttcactttttttatgattatttgataaatttaagtttgaaagttttgcctattctatacaaatattctataatatatttttttctagtattttcccctcatatataaagccatgtagatatattaaactttagaagccatttatatatttagttttatagtaagtgtttatattaagtaattataaaatagtaagtatttgatgttgagtagttagaaaataatgcttttggattatttacttcatgtatagatttaaaataagttttttaattaatgactaaagataacggtattttgactaaaagtaggcttttaagaaaaaacaatgaaacttaaatgagaatcaagagttagaaatgtcattattttagatagatatgaacataaataaacttaaaaaatataaattataaaaataataatttttttaaaataacaaagttttttgattaaaagttttatattgaaatgtcaaagtaataaaataccttataagttaattacaggttaaaaaaataatatgtgaattttctgatatttactaattatcaataaagtatttaagtattaatgtttttagtgagactttaagacagataatctcctattaaagatactatatcttagataaaataaattaaaacaatataaaaacataacaagattacagaaagaaagctcataataaaacactaaaaaatttattttaaggaggaataaagtatgaagtttcaagaaatgattaatagcccaggtctttggattgtttctagttttttagtaattatttcagttgttcaagcaatcgtatttatgaaatcagcacttaaagaggcttcaaatcttggtattgaaagaaaaggaattaaagcagcaattcgctcagctagtgttacagcaattggaccctctctatctcctgttattacattattatcactggtagctgtgattggtgctcctacgacttggatgaggctttgtgatgtaggagctgccagaacagaacttggagtaatatctcttacatcaaatttatctggagtagaagtaggtagtgctgcatttggagcagaagctttttcgtatgcactatggggaatggctttaaataacttaggttggttgcttgttgtatttattttgggtcatagaatgcgtggaattgttgaaaaaatgaatgtgaaatataatcctacttgggttaaaaaactacttgcaggggctacagttggattatttgcttaccttctttcaaatcaaataaaaacattcgaaataccaaaacttacaccagcagttatttcagctatagttatgctagtattgacgactttatttaaaaagaatcaacgattacaagaattatccttaggtattgccatgttgattggtatgtttggcacacagattgtactatcatgattaaaacagataagaggtgataattatgtatgataaaaagatgataaaaatagggagaatttctataggtcttgcaattattgcaaattttattcctgcaatctatgtaggtcttcgctttggtcagatgccaatgctttctgttatattccaaatttggggattagttgctacaacttatggagtgagttggattgttcaacctatagcttattatccaacactaggagctccaggttcttatataggttggcttgcaggttctgttggagatatacgtatgcctgcagcatcaatggcacagaaaattgcaggtgtagaagcaggaactcatgagggtgaagttgtaggaacaattggtacatgttgttcaatctttgtatcagcttctatgattactatttttaccattgtaggctataaagtaattcctttgttacctgaatttattactgattcatttaattatatacttccagcattgtttggggcaatttacgttgatattgcgcgtaaagatattcgagctggtggatgtacgattgctgtagcattagctattatgtactttggtgaaaaaattggtataccaggtggattgttgacattgtttattgtgttaggtgggatacttattacaagggttttctttgtaattgatagcaataaaacgaaagaataggattgtttactaggaagaaagactagaattatttgctgagaaaaagaataggattgtttactaggaggaaagactagaattatttgctgagaaaaagaataggattgtttactaggaggaaagactagaattatttgttgagaaaaaagaataggattgtttattaagaaatatgaatataaataagtcttgaaaggagaagaagaatgtttgatgttaaaattgccaatggaataatcattgatggtacaggaaattcaagatataaaggtgatgtagggattgtaggagacaaaatcatggctattggagatctaagtcaaaaagaggctaaagagactatagacgcaactggaaaatttgtatcacctggttttatagatttccacactcattctgatttatctcttgtgtatgacaaatacacaagaagccgtatccatacaggtgtaacaacagacgttattgcaaactgtggtataggagttgctccgataagagaagagaagaagcaggagttaattgactatcttggaacgaggataattggtacaattccaataaaattgaaccttcactggaatacaatgcaggaatactttgattacttaactgaaaattctccagcagtaaatgttgtagcttatgtagcacaaggacctgtacgtatcaatgaaatgggattttcaaaggagccagctactttagagcaacttaaaaatatgaagttggaagttagaaaggctatggaagctggatgtgtagctctttcgtcaggattagtttatttaccaggagcatatacaaagaaagaagaaatggctgaattatgtaaggaattgataccatacaatggatactatatatctcatattagagatgagggtgatgaagaaatggaagctcttgatgaagcaatttatatagctaagacggcaggagttcctctacatatttctcatttaaaagtcatgggtcataagaattttggaactattgataaggtatttaaaaagctagatgaagctgaggcagatggcttggaagttacttttgattgttacccatatacagctggaatgacatctttgggtgcacttttacctccttgggcttttgaaggtggtgtagaaaacatggtaaaacgattagaagtgcaagaaaatagggacagaattataaaagagctagaggaagggattcctggatggcaatgtttctaccagttagcaggtggttgggacggtgttgtactagcctctgtaatgactgaagcaaataaatatgtagagggtaaaactttaatggaggtagctaaaatcaatggtgaaaatccatttgatacgttctttaggcttttgattgaagaaaaaagtaaaattcaagtagttgttcatacacaaggtcaagaggatacagataaggtcgtttgccatccaaagtcatgtataggttctgatagtatggacctttctacagaaggcttactttctcttggaaagcctcatccccgtgcatttggtacttttggacgaattttctcttactatgttagagaaaaaggtatgttgacttttgaggaagcagttaaaaagataacttatctttcagcaaaacgcttaggaatttataaagaaaggggtctacttaaggaaaattattttgctgacattgtggtatttgacccagatacaatagaagataaagcgacttatagtaatcctaaacagtatacagtgggagtggaatatgtattggtaaatggtaaaattgcattggcaggaggaaagcaaactgatgtatgtgctggacgtgtaattaaaaatcctcttagcatagcaaaatagaatacattaagaacttttataaaaatagtctttctttgaatattaaggaaggctatttttgttaaattaataaagattactctacttgtgttttctagagaatttaactttaagtagaaaaaacaatatattaattgtaaaatgtaattaatattaatggataagatttaaatacaaaaacttaaatacaaaaatgttttaacagatagtcataattaaaaaacttaaagtaactttttatataagatataattgattatgcaaaattttatgaagcagcaaccttgttactttaagtcaagggaggttcagaaagtgtcttaagagataatagtatctttaggaaaggagaaacgaaatgaaaatactttatgtaggaccaggcatggtaatcgacaaaatactagcagtaagtaaaaagaattttcccaatattgaagcagattttcttagatatgatagatatattgaagtacctgatttattggaaaaatatagaggtagagtagatgcagttctttttacaggtaaatcgccatttaaattttttgaaaaaagacaaaaagattttgtgttgtctgattatattcctagacatgaaacaacattatacagagtattgcttgaaattacatatttgcttaaattcgatattagtagacttagtatagatacttatgataaagctatgctgaagagattgtataaagaaattggagttgaatttaaggatgaacatatgttttttgcagagcaaaagtatttagaagaggactacataaagtttgtgcttgaatttcataaatataattatcaaaataatgacatatgttgttgtattacaggtcttgaagaagcatatcatgcaatgaaaaaagagaatattccagtagttttagccttgccttctgaggatgtaatggtacaaagtataaaaaacattcagatgcgttatattgcaaagaaaaacaatgagaatcagattgttgttcttgctatcaaacttaatatgccttcagaatattcactgatgaaggaagatgagtacgcttatctttcacaaaggattaagattcttgataaactataccatttcaatagccgtatagatggtgttttggtagagcagagtagaagcgaatttatgatttttacaactaaaaaaatacttgagttagaaacaaagaagtacagagatatttatttgttggatatgattcgtgaagtttcagttataaacacttatataggaattggttatggaaaaacagcaaatgaagctaaatttaacgcttatgagagtattaagatggctcaaagtcaaaaaaatgatgcagcatatgtagtttttgaaaatggagaaattatgggaccactaaagccaaatcctgctgtcaaagagaaaaatagctttgatgaacgattttatcaaattgctacagagacagggctaagtgctaatactgtatataaagtgttcaataaaataataaatagtggaaaaactgaatttacatcaaaggaattagctattatatgtggtgtaagtattagaactatggacaggattatacttagattgtgtgattctggttattgtgaggtagtgagtgaacagcttatgagcaagtatggtagacccagtagaatattacgttttaaaccttttctgttgttttaaatagatataagttaaaaattaaatttttatgataacattttctttacaattttttagatatatgttaatatttagaaaaatgcatatgtattcataaaataaactcaaaatagctaaaaaatcattaaaaaggaaatcgtatgcataaaatgagaaagttaatttataacttaaataaatctgggaggagataattatgggaaaatatcaggattcaaaaaaagttgtaagaaattattttgaagcattagaaaatgctactggggatgaggttgaaaatgtcttaaagcaacatatgaaatcagattataactggaaaggtgtgtatccatttcgtgaacaagaaggcactgaaaatgtagcagatgtattttggaagcctttaaaaaaatcattgagtaatatgcaaagacgacaagatattttcattgcaggaacaaatgagattgacaatagtgaatgggtaatgagtatggggcattttatgggactttttgataaggattggcttggcattaaacatactcgtaaaatgattagtttaagatatgcagaatttaactgtgttcaagatggtaaaattgctaaaactggattatttgtagatataattgggtttatgattcaagcaggagttaatccattgccaccacaaacaggttcatattttgtatatccagggccaattgaccataatggattactttttgaagatgcagatgaagttgaaggagtaaaaactttagcattagtaaataaaatggtagatgatttatctgaattaaatgaaagtggtactatgggatgcccaccagaaatacttaaaaaatcttgggctaaagatatgatttggtatggtccaggtggaattggtgcttcttatactatacctagatatcaagagcaacaccagctaccatttagaaataatttaaaaggaaagactttcaatgggcatgtatgtagatttgcagaaggtaattttgcttgtttctttggatggcctaatctgactaatgtaccatgtggaggttttttaggattaccaggtggagaggttaaagcagatatgcaagttgttgatgtttattatcgtaagggcgataaacttcaagaaaactgggtgttaattgatattccttattggttgaaacaacaagggcttgatattcttgagagaactaaaagtatttttaatgcttagttatgcatacgtattctaaaacaaagggggatataaagtggcatctaccaacaaaaataatgtaacaagtaaagaggaagaaaaagaagtttctacaagtgggcttgaatcatgtacggttaaagaaaacaaagctaaaatgaatcaaactaattttagtaatataaatgaaaatcaaacaaatgagaataaaacgaacacatataaaggaaatatagataaaataaacacaaataaatccgacataaataaagttaacatagatacagtggatacagataaattaaatacaaatactcttactgaaaaaaataaaaaagttatatttaagggggaagataatatgtcatctacaaaaatttactatggagattcattagaagtaacgcctgttggagtaatggattacaatgatttttcaaaacagacaaaaagggaacaggaaatacctggatttgattctaagtatagagattttgtagattatattatgaagattacacataatatctgggaagaaaaaggtataggtgttatttatgatacatatcacaataatgttacaatgcattgtggctcttcaaatttagttggtattaaagatgttatttccaatactcttcaaacattacatgcgtttcctgatagaagattaattggtcaaaatgtaatatggtctaactttggtgctgatggttttttatcttctcaccgtgttttgtctacagcaactaacttaggtgatagtaattttggaccagcaacaggtagaaaaataaactttagaactgtaattgattgtgccacaactaacaatagaatccacgaagaatggttggttagagataatttatggattgttactcaattaggattaaaccctcaggaagtagcaaagagtatggcaaaggcaagtgaatctaaagtgcttagcttacaatcaacttatggtatctgtgaatctatggatggtcaatttatgccaactaagtatcaagcaaaagatgattctgttggcgaaatgatgcttgaaatgacaagccgtatttataattataaatatataaatgaagttaaaaaatactatcatgataatgcagtagtacattttatatgtgataaagatttaaatggttatgatgagattcaaggaatgattgtaagtttacttgcatcaattccaaatggaagttatgaagtggaaagagtaacttgtaatcaaagagaaaaaaatgaaggttatgatgtatctataagatggagattacgtggaataaatgaaggtataggattttttggacagccttctggaaagcatatagaagtaatgggaatcaatcattatcatatacttcaaggtaaagtaaaggaagagtggataacttttgatggtatggatgtattaaaacaaatgtatatgggagtagaagaataaagctgtttagagtataaataattttgaaatgtatatagggaagtattgctttataaaatttaagtggggaatgtatatgaaaaatagatgtttaaacttttagcaaaaattatgactaaatttaaaagggggaattataaaaatatgaaaacaacggttgaaatagaaaatgatatcatattaggaaaagactattcaaacctaaaaagaggaattgcatttttttcaattgctttaatatactttttttattgctacaattttatggtgggtacttttattaaaccaacaatgatttatgctttagcagatgggggatttggcttttcattaaaacaaacagaagaaatatttgcagttatgtcttttggtacaattccaggtacatttatttttggggtgatttctacaaaaattgggaagaagaggactttaattagcgttgctttactgattggattgacaacatttataccaatgttatctcctacagatattatgttatggaaaatagcacgtttgtgtacaggagtagtgttgggaggcgtatttggaacagctatgcctttagttgcagatatgtttccaagtaaatatcgtggtaagttagctgctatattaactgctttattttcattagcaatgatttttggtgggaaagtatatggcgttttaggtgatgcaaattggcaaatattgatgtatactgcgattataccacctatagttggagctatcttagcaatcttctttgtgccagatgatttggagtatacaaaggaattagttaaaaagggaaaagaaactggtgaaaagattagctatataagtatgtataagggaaaatacttatggattggattgggaacgattcttttatcaggtgcaaattttacagcatattcagcattttcaaataatgcaactacatacctagtgacaggaataggaatgtcagcagcagtggctgggtctatatatagtttacaaggaattggtcaattagtaggatatttattctggggttcaattgcagataaatttggaagaaaaataccttttataggtatggcattagcagcagtatttgtttttatatatacaaaattaggtggagataatacaacaacattctatatgatatcagtattactaggtgttgctgttggatattctggagcatggggagcatactacacagagttgtttccaagtaaatatcgttcgttgtcatctggtatgtcatttaatggaggaaggattatatctacgtttgcaatacctgctatagctggtacagcttctggtactttaggtatgatgactatcttttacatatcaatcgcagtctttgtagcaggtgctattgtatggttattcttaccagagacgttaaataataaaaaataaaatactaggaatttattttgttacttagaaaggggtggcttatgatttcatcaattgatgtatgtattataataggatatttgctattaatgttagttattggttattattcaggaaaagataataaaaatcaagaagattatttcttggcaggtaggtcaatgccatggattccaattgctttatcagttgcagctactatgattagtgcaaatggctttataggtggtcctggatgggcatatgtagatggaatgtatccagtaatgtaaaatgtgcaaaaaattcttttgtagttagtgcatttgttatgaatttagtttactactttatgctattggtaggagtaattttatttgttttttatgggggaaggacatttgaaacttcaaatgaaataatgattacttttattttaaatgaacttccagtaggagccattggaattattattgcaggtgtgtttgcagcagcaatgtctagtatcgactctatattaaacagtatgacaactgtttttacgaaggatatttatgagttttatttcaaaaaagacaacaaagaatcatcattaaaagttacaatgattataactgtagttataggagttgttatgacaggttttattattatgggatttggaggaagcatcaaatcaattcttgaccttgttggtaactatatctcatactttgctggaccagctacaggtgcatttgtactagcaatgtttacatataaagctaatgataaaggagtatctattggttttattgtagggttagttttaggattttttatttctaataaatataatgtgagttggttgtggaatccagcaataggtgctacaataacattgatatttggatatatttttagtgtcattttaaagaaaaatcataaagtagatgatattaaaaaatacactgcatttggtatgagaaatcaccttatttctcaaggaatggataaagtagatggagtatctatagtgccattttctttaggtaaacaagaactaattgtattagctttttttattatccaatatattatattatttttgatacaattttaagaagaaatactagatatttaaggagaaatactaaatgaatcaaaagaaagttcattataataaatcggctacatcaaaagatgtcgcaagattggcaggagtatctcaatcatctgtttcaagagcatttggtagtgcaaatggaaagggcgtaaaacctgaagtaagagaaagaatttttcgtgtagcaaacgaaatagggtatgttcctaatttggtagcacggggaatgattagtggaaaaactaatgttataggtttgatagttggtgatagtctaggtccattttacaatagaattatcaatttatttgtagaaaaaattcaagagataggtaaacagtgtctcgtttttaaagttcctagacaacaaagtatagatagtataatttcaaaagtaattcagtttcaagtagaagctgtgattattacagcttcggccatgaataaggtgatggctgagacttgtgaagaaaacaatattcctgtgattctttttaatcgttttatacctggtataaaaataagtacagtctatgtagacccaattgaaggtgggggcatggttgctgaatatctgcttaagaaaggtcataagaatataggatatattcaatttacgagagaaacaagtgaagaaatggaaaagaaaattggattttattctaagttaagacaaagtgggattcataaccttaaagaagaatctgcaaactatgattatgattctggatatgaagcaggtaagagaatgttagcattatcaaatcctccaacagcaattttttgcacaagtgacttgatagctattggtgtaatggatgctgcaaggtttgagtacaagttgagggtgccagaggatttatcagtgataggatatgatgatattcaaatggcttcatggaagagttataatttaacgacgattagacaaccactagatttgttgattgaaaaaacaattaacatacttaagtccttattaaatgaagaaaatccagagtcagtcgttgaaatgttaaaacctgaattgattgaaagaggttctacactttaagtgatagatatttaattaagtggtagatatttaattaagtggtagatatttaattaagtggtagatatttaattaagtggtagatatttaattaagtggtagatatttaattaagtggtagatatttaattaagtggtagatatttaattaagtggtagatatttaattaagtggtagatatttaattaagtggtagatatttaattaagtggtagatatttaatcaagtgatagatacctaattaagttgtagatatctgataagaaatttttaagttttcaatcgttctaaattgtgagtataaaaatctactaaatttagttatgtaaaatataaattataagtgtagaaactaggctactagcttttataccacttcaaacattactggaagtagttaagtttacagcagtttagttttatgtagatataatattctgtaaatagacaaaattaaaatatgtaattaaaatatgtaagtgtctcaaaatgaaatttttaatttatgaggcacttttttgtataaaatcaaatatatttttataactttaacaataaaaagaggcttatctctattttgagacagcctcaaatttttaaaactatattagtttacagcttcttttcctatcaaatcttttaactcttcatgagtcatagtttctttttcaaataagaatttagaaacagaatgtaaatcttcaagattatcctttaacatctctaaagtctctttataacaaatttcaactatacgatttgcttccttttgaaccttatcacataagaaagtcttatcatttccatcaatagtcataaatcctaagttactcataccatattcacaaaccatttggttagctatttcagtgactttctttaagtcgtcctttgcaccagtagatttatgattaaatattaattcttctgaagcctttccagcaagtaatatttttatttttccaatcaactcatccttagtataaatatatctatcttcatcaggtaattgaagaacataacctaatgcttgtcctctaggaactatagatattttttgtataggacaaattcctactatatcacttacaagagcatgtccagcttcatgatatgctactatttttttctctttttcaaccaatgcagagtttttagattctagccctgcaataactctttcaagtgccttgtcaaaatgttctgatgtaatacactcactgtcatctctaactgcaaatatagctgcttcatttgctatatttgaaagatgagccccattgaaaccatgagtttttttagctaaaagttctagatttacagatttgtctataggtttgtcatctgtatgtacctttagaatttcaaatctagtgtgatagtttggtgcacctatatgaatgtgtctgtcaaatcttcctggtctaagtaaagcttcatctaataagtcaagtctattggtagcacctattattaatacattggaatctttattaaatccatccatttcaactaaaagttggtttagtgtttggtctttttcgttgttactttcaagatgtctctttgctcctacagcatctatttcgtctataaatattatacttggagcttcttttctagctttttcaaatagagttctaactctttttgctcccacacctacatatttttcaacgaactctgaaccagtaacattgaaaaatgatgagtttgtttcaccagctacagcagatgcaagtagggttttacctgttcctggaggaccataaaataatactcctttaggtatttttgcacccattttttgatatttttgtggtgacttcataaaatcgactatttcaaatagttcttcttttacttcgtctaatccagcaacgtctctaaatgtagtctttggttttgtagaaagtgaatcatctgtttgattatctctttccatttttgtctgtgcaaagacaggagctggattgttgattttcttaaaaaagttgtttagcattttcatattcacacctcaggtaattaattattgttaatcaattttatattttccatatttactattttttattatttatttttcatggaaaaaatatacatgttatctaaataaaaataaatttgtaagatgtatgaaaaaatgaatttatgtatatagagatttctacttatgtattgaataaagtattacaaattataaattatgtattgattatatattgagtaaagtattataaagcatgtattgattaagtatttattaagtattgaataaaatattacaaatttagttgaaatgaaaatgataaaaaatgttgtgctatattttacaaatcatataaatagagaaattgttgtagcacaaagtaataggtagtatattagaatataatataggatttgttgtgtagtatagtagcatattagaatataatataggatttgttatgtagtatagtagcatattagaatataatataggatttgttatgtatatagtagcatattagaatataatgtaggatttgttatgtagaatatatagagtcatgtagaatataaatatataaaaggattttgggtataaatttaaaaattaatagcaaaatgagtagtatagacatataattagtagtaggaagtaattaaatttttcctaaacaaaaaaaatagttgcaaataatttgattaagtgatatagtaaataaggtaagaataaaacaaagaagaagtccgcttctcaccttacgccggaggttagtaaggtaaatataagttaaagcttaattttaatttaagtttgtttaaatttggtaacttatattgcggatgattacgtcatccgctttttattttataaaaattttggaggtgtcctacaattagcaaagaattagcaatcaatgaacaaataaaagataaggaaataagagtcctttcaccaacaggtgaacaacttggagtaatgcctactaaagaagctcaagcaatggctaatagcaaaaacttagatttggttcaaatctcgccgaatgcgaatccaccagtatgtaagataatggattatggaaagtttagatatgagcaagcgagaaaagagaaagaagctaagaaaaaacaaaaaactatagttgtaaaagaagtaagacttagaccaggtattgaacaaaatgatttaaatacgaaagctaataatgctataaagttccttaaaaaaggggataaagtcaaagttgaacttagatttagaggaagagaattaggacataaagacataggtaaagaagttatgcttaagtttttagatataataaaagagtttggagaaccaacaaaagcccctgcatttgagggtaataatatggttgtaattatagatccaaaaaaatagatgattaactgagaggaggaatttgtcatgcctaaaatgaaaactcatagaggtgcagcaaagagattaaagaaaacaggaactggaaagttaaagagagctaaagcttttaaaaaacatatattaactaaaaaatctgcaaaaactaaaatgaacttaagaaaatcaactttagtaagtgatggagatgccaagagaatagcacaattattaccatactaagatacagattgtaaataataactatagaagagggatataaaaggaggtcataacgatggcaagagttaaaaaagctatgaacgctcgtaaaaagcataagaaaatattaaaacttgcaaaaggattcagaggatctagaagcaaattatatagaccagcaaatacattcgtaatgaaagcattaaaaaatgcttatataggaagaaagttaaagaagagagacttcagaaaactttggatacaaagaataaatgcagctgctagaatgaatggaatatcttattcaagattaatgaatggattaaaattatctggtattgaagttaacagaaaaatgttatctgaaatggctatacaagacccagaaggatttgcaaaattagcagaagttgctaaagcaaaattagcttagtattgaatcatgagatgtaaagtctttgagttatataaataattcaaggacttttttattttttgaaaaatacttattagtgtcatgtacaaccaattttataatgataaataaaataagcaatacaatagaattttatgagatttattataagaattgttacaattatttatcatagctataaaaagtcatagtaaaaatgatattgatgtatgtttatatatgtataaagctttcaatcaatcttgaattaatattatcaacatgataatattatcttattaataatataaataagggggagataatatgaatgagaaactaatggattgttttgtaaacccaattaaatgcaagttattgcttgaagttttttcaaataatcgaactacagctaaacaattaggagaaaaatttcaagatatatcaaaggcaacactttatcgttaccttaataaaatgttgaaagatgatattataaaagtggttgaagaaaataaaataaggggaactgttgaaaaagtatatgctatgaagttagatatagctgatgatgtgaacaaaattatagatgagaactctggagaagaatatgctcaactgtttactcaatatatgatgggatttttaagagaattttatgaatacgctgaaagaaaggaaaaggatatcctaaaagagggttcaggattttctgtctgtccagtatatgctagtattgatgaaatagttgaagtgagtaaaaaaattgctagtatactagaacctctaagaaataactcgcacgaagaaggcagaagaatgcattctataggagtgataatcactccacctaaagaggatgaagggaaataaatctgatttacatgaggtagagccaatttacacggaaaatcgttttatgatttacatatgtatccagagcaaagtatctctgcatggattgtacttcattgtaccatttcatccaatgacttggagtggaacaatgaagttttttaatttttcatattaatgcctaaagaaatgaactttagaccacatatgcaattaggctacattatacaattagaccagatatacagaataaaaattagtatttttatagcagataaattgactgttattcttcttaaaaatcatctattagttattgttagcatattgaaagaaattatagtaatccattgaataaatgaatattgcccataatcatataaactgctatagtttaaaataaagcaggacgttaaattttatagtaatcttaaaatttaagagggggattttatgaaaataaaatttgttattatgccattggtgatatttttaatagtattatttgtggggtgtcaaagtacaaaagatacagaagttaaagcaaaagatacagaaattaaaatattaggtacaggtgatttgcattcaattttgacagactctatggtttcatatgtaaatgaggaaagggaaaagaataaaaatctgcttatggtagatgcgggagatttctatggtacacaaagtagagaaatgtgggaatggtcttctggaaaaaagttaattaatattaaaagaaatggtagagcagagtatgatgacataattaaaagtagtaaagatgaagtacctatagttaaagatatggcaaagttgaaatatgatgctgtagttttgggagataatgaatttatttcaaatgataagcaaagtcttgataaactagtttctgattttaaaaataataatatgccattggtatcagcaaatatatatgaacaatctggagaaaattatgtacaaccatatgtaatgaaaaatattaagacagatgagggcaatgtaaaagttggaatactaggtcttactataaaagaagtaggggaaacccttggtcttgaggattttgaaaaggataaaaaagctagagagcttggagaacaagctgattacaaaggaaaattatatgcaaatgatttagtagaagatgcaaagaaatggataaaagttatggaaaaagaaagtccagacataatagttgcagttgtacactcaggggaagaacctaaaacagatagaaatccaggaaatagaataaaagagttagcaactacagtggatggaatagatgcaattgtagctggtcatactcatgaaaaaatagatgaacacaaatataaaaataaatctggagatgaagtaattgttacacaaccaggttggcatggagatagagtatcagagattaatttcaaattaaataaagagaatggaaagtgggacataaaggaaaagtctagtaaattaaaaataattgataaagaagtaagtatagttgctactgcagatttacattcacatttctctgataaattaacagttgaccttgttaatgaacgtagtaacccaattgaacctgttgtagtagatgcaggcgacttcttagaccctcaaacagatgaaatgactcaatggtataaagagtggaaaagtataagagataataatagtgataaaacgattagtagatgcccaatggtcatggatatgaatcagggaatgtatgatgcagtagtacttggaaatcatgaatttgtatctgaaaaagatgaattttggtcagatgaacgccttttagatgctgttatagaggattttgaacaggtggcaatttctgtgttatcagcaaatatatataggcaatctggtaaaaattatgttaaaccatatattataaaagatgtggagacgagtgaaggtaatgtaaaagtaggaatattgggacttactataaaagaagtaggtaaaggtcttaaaaatgtaaacttacaagagcaatttcaatataaggataaattgtatgcaaatgatttagtggaagatgcaaagaaatgggtaaaagttatgaaaaagaaaaaaccagatataatagttgcagttgtacattcaggagaagaaccaaaaaatccaaaacacccaggaaatagaataaaagagctagcaactacagtagatggtattgatgcaattgttgctagtcatactcatgaaaaaatagatgagcatgaatataaaaataagtctggagaaaaagttatagtgacacaaccaggtgagcatggtaaatattattctaaaattacctttaaagtaaataaagaaaagggttcgtggattattaatgataaattcagtaaaacaattgaggttgaataactttataaaatttatagataaagtaaattatctgatattgacatgatatataagataaagtttctaatattagtataatgcataatgtgaaatattttaataataagagaataaacaagacaaataaaaatattttaacatgtaagatatagtatgaactattatactaatgcttactttataatttgaacatgttagaataagtcttatttgaaaattttagtgtattagagtaagtattattttaccagtaaaaaatattgagaactatatgtagatttgcttaaaaaggaatttacatatagttcttttcgtataataaatagtacaatcttatatggtaaagataaagtgtgatattaaattttattatcatccaaaatctaaggaggagtctcttatgaaaataaaatttattatagtagcatcaataatatttttaatagtattacttgtggggtgtcaaagtactaaagacacagaaatcaatgtactcgccacaagtgatttacattcaattattccagataatttaatttcctatgtagaagaggagagaaaatatgatgagaatctacttatggtagatgcaggagatttttttgacatgcaaagtggtgagatgaataagtggtttactggtcaaaaattagtaagatttaaagatgggataccagagtacaaaaaaatagctgaaccacgtgaaggagaagttccattggctaaaaaaatggcaaagctgaagtatgatgcagttacatttgggaatcatgaatttgtatctaatgacaagcagagccttgataaattggtttctgattttaaaaataacaatataccattagtatcagcaaacgtatatgaacaatctggagaaaactacgtaaagccatatgtaatgaaaaatataaatactgacaagggaactgtaaaggttggtatacttggtctgactataaaagaagtaggggaacgttcaaggtttaaaagttttaaacaagataaaaaggctagagaacttggggaacaacctcaatacaaagggaaattatatgcaaatgatttagtagaagatgcaaataagtgggtaaaggttatggaaaaaaaagaaaagccagatataatagttgccattgtacattcaggtgaagagccaaaaaatcctaaaaatccaggaaatagaataaaagaactagcaacaactgtagagggaatagatgctattgtagcaggtcatacacatgaaaaaatagaacagcatacatataaaaataattctggtgaagaagtaatagtaacacagcctggagctcatggtaatagtatatcaaagattaattttaagttggataagaagaatgataagtggtttataaaagacaaatatagtgaattaaaggtttttggaaaggaagtaaatataattacaacttctggtctgaatccaaaattttcagatgaaatggcagttaatttgtttaatgaaagagatagagatgttcaacctatctttatagatactggagattttttaaatactaatacaaaagaaatgactaagtgggctaaagagtggcaatacaatgaaaataaaggcatctataaaaaaataaatgaatggccaattgtatatcttggttatgatgctgtagtacttggtagccatgaatttacagaggataaagagacttttgagggaaaaaaatctacattggattatattatagaaaactttgaagaaatgaagataccagtattatcagctaatatatatgatgaatctggagaaaattatgtaaaaccttatataattcataatgtagaaactagggaaggaaatataaaggttggagtattaggtcttactactactgataaggatgaagaagacttaagtagctcaagcttaagcaaagactcaaagacttcgaaaattcctgaagaaacaggaaagttatatactaataatctagtaaaagatgcaagcgaatgggtaaaagttatgcaaaaggaaagtcctgatgtgattgttgcagttgtacattcagataataatagtactctaaaaaatccaagtagtgaagtcaaaaaacttgcaatgtcagtagatggaatagatgctattgttgtaggtcatacgaaaaataaggtagaagaacatatttacaaaaataagtctggagatgaggttatagtaacacaatctggagaagattgttattcaaaaataagtcttgaactaagaaaagaaaatggcaagtggaatatcataaacaaatatagtaaagcaataaaaatgaagtgaatttattgatatataaaccattattaacactgatttttataatataataaatactgattctacaatataattaacactacttttttaaatataataaatactgattctacaatattattaatactactttttataatataatcaatactactttttacaatataatcaatactgattctataatataattaacactactttttaaatataatcaatactgattctataatattaacactattttttatgctatataacaattattgaaaatgatataaatataatatctcaaatgatatgaatataacatctgaatagagggtgttttatttgtaaaaaataagtttacagtttgagcgtataaacttatggtaaaggagaataattatgaattataagaagattgcaattataacgggtgctaatagtggttttggtaaagagtttctaaagttattaataaatgaagaagaaataacagaaatatgggcagttgcaagaaacaaggcgagattaaatcaattagtagatgaatttggaagtaaggtaaaagttttttcaaaagatttatcaaaaatagaagaagtaaaagaaattggtacatttttaagtaaagaaaatgtatgtataaaataccttataaacaatgctggttttgcaaaattctgttcatacaatgatttaagtatagatgaatctattaatatgattgatttaaatattagtgctgttgtagtattgggacttatatgtattccatatatgcaaaagggaagccatattatgaatatttcttcacaagcatcattccagccattgccatatcaaaatatttatagttcaactaaagcgtttataagaaattatacaagagcattaaatgttgaacttaagagtaaagggataaatgcaattgctgtatgtccaggttggatgagtacaaatctatttaagagaggtatagttgtagctgaaaaagggacaaaaaatttcccaggcatagtgtctccagacgttgttgccaaaaaagcattgaaggatgcaaagaaaaataaggatatttctgtgtatggtataaatacaaaatccagtcatttattagcaaaactattgccacaaaaaatgatgatgaaggtttggttaatgcaacaacatattaaggaataagagtttcggtaattaagtatcagttggagattcaatctattatatattataagaagttttgttgagcaaataataattgtgacaaaacggcttatctagtgccgataagccgtctataatgtataaaaaatatatttttgattttactttatttagatattgaagtattaaaatatgtaggacttgaaattttataaagataaatactatgatattttgtaaaaactgagatatgttgatattacatagtttaactatactgttaaattgaagttttcttattttgcattatgcttattacttaatgatttagactataatttccataccatcatatgcaaaataaatgttatcaagtttcttttctaattcactgtaataaccatatgattttccccacatttcgtcaatatgtgtaatgataatctttttaattctataatagtttttaatttcaacaatctcatctaaagtaaatatttcatctttaaatggtgtgtcttcaagttttgtaccatcatttaatataccatcatcagaaactagacttattattaaaacatcagcatcaaagtacatatcactatgagtaaatggcttgggattacagcaggcatatatgacttttttttcattctctttgataacatagaaggttatattcctgtctgggttattgttaatcaaatcaatatcaaaattatttatctttacatgcgaagtttcattaatagaaatgcaatttataacatcaccataatatttaagacaatcgagattcgttcggtttatatcttcaattacttcaggaagagcataaaagccaattggattattttctcctgtgataaagtcacatcctattttttcgacaattctaatacccttaacatggtctgggtcatggtgagaaattgaaatatgttttacttccgatattttttgtctgttacaagctactgtaatatcttcaggtgtgtctatcagcatttttatatcatcaatatataaacttggtcctaatcgttcatatcttccgcctttttgcctggcttcttcacatattttgcatttacaaaatgaacttggaataattgacataccgccactaccaacaatttttaatttcaaagttattacaccaccttctaaaaatattagattatataaataatctacaatcacaactgattaacaaaattatgagttaataaattatatcacatgtaaatatgaaagaatagtatgaaatttttataagattatattaaatatttctcaatgaaattgactttgtatatgagccgaatgactttattcaatatagataagacatttttcttgtaataagatatgattattctataaggttcatgtaattttgatataaaatattgattaataacatatatgttattggtgaacatatttctatagaatggaatatataattttttatatttatcattgtattattatacaaagaaagttaaaaagagtagagtacaaaggaattatttgtactttactctttgttttgttaaaaactaatttatattagtgattcaaatatttaactagagtataagggttgtatataatcttataagtaatttatctgacaaattaagataatatcctaatcaaattctagtcattcgaacataacatcacaagtgatttatctgacaaattaagataatatcctaattaaattgtagatatttatacataacactaaaagtaatttgtttaacaaattaagataatatcctaattaaattgtaggtatttatacataatactaaaagtaatttgtttaacaaattaaaatattatccaattaatataaaaattacttctttttaactgggaagcatacctctgttacccaattatcaggattactatcgttgccaggacttacatgataaatattaaacataggaccatccacatcatagttattatctgatatccaattaccaatagcctcacaagcgtctgcaacttgattgaaatttccattaacaattgcagttgcagcagtcacacttggaacagtcttaaatttaacatgttcagtatctttatactttccagatacagcaacttgtacttcaacatctacagaatcttctttatatccagtatcataaaagactgctttagaatactttgggggttcaatttgaacattctggtcttttgtctctaaaaatgcttgatgccataacattccttcgtcttgataagttggtataacccttctaagtgtcatcatatattttggtgcaaaattctttatagttacatcataatttttcataatatcatttcctccaattcttttaatagtggtttctatttttaatagttttttctgtgtatcttctaattgttcttttacttgagaatggtggatatttagatattttataagactttctttatcgttatattctgtcaaaatttcttttatagaatacaagccaaagcccatatcttttagtgcatggattctatttgtagtagaaagttggtctgcactatagtatctatatccattagtgttattcgtatgagaaggagttaaaagtcctatttcatcataatgacgtaacatacgaatactaattttacttagctttgaaaaatcgcctatcttaaacatgtttttgtctcctttataaaggtacttttagcttaatattaatataaaccatatcataatgttagagtcaactaaaattataattaaattatattgacatatgatgaaaaaaatattatactgaacatgttcagaacctaaaatgttaattattttggaggtctattatgaaaagtaatgataaagatgctagagaacgtataattgaagttacattgaatcttttaaatgaagtagatgatattgaggagattacagttagaaaaattgctgagcgtgcaaatgttggagttggtttaataaattatcattttaaaacaaaggataatttgttgagtactgccataggagatgtgatgtcaaatataatagcagagctatatgacgatagtgtatatactctaagacctattgaagatttgaaaaatttattaaaaaaattgtgtgatactggattacattatgaaaaagtgcttccttttgtgttgaatcaatgtataaccaatggagatatgcaagcagaacttgatattgtccctatgcttcgtaaaatttttggaaataaaaaagatgaaatgagtctaagaatcattgccctgcaaattattttaccaatacagatttctgctttatctacagaatcatttcagttatacagtggtataaatataaagaataaatatgagcgagataaattcattgatattttaatagaaaatattattggagaggatgttgatgtaagatgaaaattataactattggttcaagtcttatcactgttttactttttctttcaactatggtttgtgggttctggattaagaataataaggtaacagatgcaagttctattaagttccatatgaatagtgctatttttacagggatatttttattgatttccacaatccttttaattatatatataaaaaaataataatattattaataaataaagtatcagaaattataaagacaagagtcttaaaaatttctgatactttaccacataattttattaaacattaattgtgtgtgaaaaaatatcacttatttcaatctaatactaaatcttaagagtgagtataaagtattagaaattaagaagcattttttagttcaagtggattatctataccaaaataatcatataaagtagagcttatttcctctaaatttccatcttggaaaggtaattgtaaatttaccttttctaccacatctttaaatccagcatcagtattttgatttaaaaaatccatatatacatcaacagcttttctgtaatcttcttgtgataattgccatatctgaagtgatacatcagatgcaagaccataactcaagtaataaaaaggaacttggaagttatgagatacaagtatccaaaaaggagcatttttttctctaagtatattattggaaactccatattcttcctctaaatcaaaaaacaatttattgatatcatttagactcatatatggattcttgtatataatttcttgaaattcatcataaagacaagcatcaataatagtatttaaaacaatcgataagtgttctttttttatagcttcagattgtttaccaaaaaaatcatcaaaatatttataaaatagaatttctaaagatgttgaatgaacttcacatacatctatacttggttgcatcttattatttaagttaatactgttgtagtaattataaaaatgaccaaactcatgagcaaaactagtaacacctaaaaaagaattgtcccatgtattaaacaagaaaggtgctttatatttatttatataagtagtatatcctccaggcgatttgttttttccagaagaataatcgtacaagtcatattttttcatatagtcgaagctctcttttagttttggagatatatcttcaagtactttatcaaacttcctaaatgagcgatttttatatactttaatataaatagaagaatcagatggtttagatgaaatctctctatataatggaactatgtaatcttttacatcttgtctaaattttttagcttcttcttgagaatagtctttgtttaggttcatataggcataatctatataattcttaaatccttgcttacttgctatttcagttcttgtctgtataagttctaagaatatgttaccaaatataggattgtatttttttaagtaatctgaataaattttcacatattcttcagggctaagatttggtcttgacaaggcttcttcaaagtctacctctataccatctattgatactgtagatttagctaataagtcttcatattttacaactaggtcttgctcttttttaagtaaatcttcaacttctttagaattaagttttccaatgttctttagataattaaatgtatcctttccaagttctttttctaattctttagagaatttagaagttacaaatctatcttgaaagtctttgtatgacatgtcaacatctactgatttactcataagatacttatattccttagagtaaaattcgtctgatgaatctatgttatttctaatttttgctatagtaagtgtactgtaaaaatcctgataaattttatcaacttcattaaataaatttaattgttccttagctgttttagctgttaaaagtttgtcgttacacttgttaatgttttcgcaaattgactgtatattaggacgcttatattccattttttcaaaaggaatagttcctctaacagaatctttttttgtatcattagtataatttcttatgtatgatgcaaatataataaaaactgcaattaaaattagaaaaacaaatattttcttcttggatttaaccataaaaatcctccaatcatggatatagttattaattattttactatattaaatataaaaaatgcatgttaagaaaatttaacataaagatatagataagattataaataatataaaaaatttaacttcaaaaaagtatatgaaatttatactggtaaaatgataaataaattttaagtacaaaatagtaaaagctatgatagttttagacccattatatgtaaaaaatatagatgtttttggtgcaatttaaattaaaagatatatataaaaatttaaaatattccaaacagaaattataaaaattactatcattgtctttatgcaatatttatactataatagaataataatttagaggaaagctctaaaaataaacaaattaagggtcttaacagtagtgattttatgttaaggaggtataaagaaagttgaaaacaatagttagaagacttattctctacgcagatggaatgcgtcctactcaaataatggtatctgggtttgctgcgattattgtaatcggagcattgttgttaacactcccgatagcgtcgcagagtggagagagtataggcttattaaatgctctatttacggctacttcagcggtttgtgttactggtctagttatggtagatacagcaacttattggagtttatttggacagatagttataataacattgatacaaattggtggtcttggatttatgaccgtagccacaatgttttcacttatggcacgaaaaaaaatacaactaagagaaagattattaatacaagagtcattaaatcaagctgatttatcgggacttgtaagacttacaagatttgtattaataataaccataacaatagagggaataggtgcactggttttatcaactgtctttattccacaatttggtttgtctaaagggatatggtatagtgtatttcacgcaatatcagcgttttgtaatgccggatttgacttgatgggcagtgtaagtggcccatttacatcgttaaattcttatgtaaacaactttacagtatcaatgactgtttgcgcacttatagtgcttggagggctaggattccctgttgtacttgatattgtaagaaaaagaagattttcaaaattaaatgtgcattctaaggttgtattgttttcaactgctacacttatttttgtgggtgcattatttatttttcttatagaatttaatcaaaaagctactatggcggacttgcctttaaagggaaaagtactatcagcaatatttcaatcagtaacagcaagaactgctggttttaatacacttgatttagctactttacgagaaagtagtgtatttgtaatgataattttgatgtttattggagcatcacctgcatcaactggtgggggtataaaaacaacaacactagctgttttaatcattacagttagaagttttctatcaggaaaatcagatatagaagcttttgaaagaagattagctccatcaactataaaaaaatctcttggtatatttgtaatcagtatatcagcagttatttttggaacattgattatttcaataactcagcctaattttacattagttcaatcagcttttgaggttacatcagcacttgctacagttggttcaagtttagctggaactccaaatttaaatgctttaggtaagattataataataatctttatgtttatgggtagagttggttctcttactttatttatggctatactttctggtggtagaagaaagagtcaaccaatcagatatgcagaaggtaaaattatggttggttaagttaccaaggagtaatataaatttataatggatttagagtagcactgtaaatctgttgataaaataaatgagcctagatgtaattatatgaagaaataaaatcaactaataaacaaaattaattaatgaaataaaaaaacagggaaataaaatacaaataaaaaggtaaatcaaaattaaattaatctgtgtatataaaattatatattgtgtataagttttgtatgtgtaaagtatataagttttgtatgtgtaaacaattaatttaagagatattatataaattgtgtattagggaggaagtttcgagatgaagcaatatatagtcattgggtgtgggagatttggaagttcagttgcgtctactatgcatcttttaggacatcaagtaatggcaatagacaaaaatgaagattcagttcaaagtatatctgacaaggtaacccattcacttatagtggatgttactgatgagcaagcgttaaggtcattaggtttaggtaactttgatgtagcagtagttgcaataggttctgatataagggcatctataatggcgactcttatagccaaagaaatgggtgtagagttgataatatgtaaggcaaaggatgaattacaagctaaagtgctttataaaattggcgcagatagagttgtatttccagaaagagatatgggagtaagagttgcacacaatttagtttcggataatatattagaccatattgaacttgacccagagtattcaattgttgaaatcgtaactccaaatagttgggttggcaagacacttatagagcttgaattaagagctagatatgagataactgtacttgctataaaaacaggtaaaaatataaatgttacaccttctccagatgaggaacttacagccggaagtatcctagttataatcggtcaaaatactagtataacagcgataacatctggaaataaggggataattagaagaagataatttactatttaatatatatttaattgcaatgaaagtaaagagtatcatataattatgaatagttatatgatactatttttatttaatcgaaggtagtatttatttgtaagattagataaagagaagttaaattaaaagtaaggaggctgtgctaatataaaaatttataagttattagcatttagataaaatgattacaaatataaacagtaaggataatgaaaagttaaagtatacaagagcactattaaaatcaaagaataggaataaagagtcaaagttcataatagaaggatacagaatagtaatgcttgcacttgaatgtatggcaaaccttgattatgtatttatcaatgaagaatttgaaaataagaaagaacatgtaaaactattagaagatttggataaaaaaaacacaaagatatacaagactactaataaaaactttaaagaattagtggatacagaaaatactcaaggaataataggtgtagtttcatttaagaaaaaaaaattaagtgaaagtataaataaaaaagataaatttgtattgattttagatagaatacaagacccaggaaatatggggactataataaggactgctgattctgctggagtagatgccataatagcactaaagggatgtgtcgatatatacaacccaaaagtaattaggtctactatgggttctatttttgatatgaatataattgatgcttcacaagatgaaactgtggacatgcttaaatcattggattttaatatagtttcaagttacttaaatacagaaaatttttatgacaaaatagattatggttcaaaagtagcattggtgataggaaacgaagcaaatggaataaatgaagaacttgtatcaaagtctgatattttggttaagatacctatatatggtaaagccgagtcgttaaatgctgcgataagctctgctatactgatgtatgaaataaaaaaatacttaatttaatgtattgtaataaatataatgtcatgttataatcttgaattaaatagtagagtatcaaaaatagtcaatatatattaaaaaaataattaaattaattatatattagatgtatatcatataaaaaatgattgagttgattatgtattagatatatattatataaaaaataattgagttaattatgcattagatgtatattatataaaaaataattgagttaattatgcattagatatatattatataaaaaataattaaattaattatgtattggatatatattaaaaatagtcacataatttgaatggaaatgatataatactaaaataaacaatataatattgtaaatgcaatgaaagaggaaagtattttgattaaacttagtaaagagataaacacctaggctgggagtgttttctaagaggtcatgagaagttccctctggagtaacagagctgaaattttacagtaggctttgacgtcaaaaacgcgttaagtttgttagaggtggtttgatgatttttaaattgttaaactactagggtggtaccgcgaaactatagcctttcgtccctagacagggattgaggggctttttttatacaaaaaaacgaaagggtgatatgtgtgcaagaaaaattacttgctttacgtgaagcagctttggctgaaataaaagaagcacaaagcatagaaagtgtagaaagtttaagagttaagtacttaggaaaaaaaggtgagataactgccatacttaaagaaatgggtaaattatctgctgaagaaagaccagtagttggtaaggttgccaatgaggtaagagaaaacattgaacttagcataaattctaaaaaagaagaaataaatgctattgaaaaagaaagaaaattaaaagaggaagtgatagatgttactcaaccaggaaaagttttaaaggttgggaagaagcatccaataactcaaattatagatgaagtaacagatatatttatcggaatgggattctctatagcagaagggccagaagttgagactgttgaaaacaactttgacgcattaaacgctcctaaagaccatccatcaagagatatgagcgatacattctatatcaatgatggggtattacttagaactcaaacatctccagttcaagtaagaactatgagaagtcaagagttaccaataaaagtaattgcaccaggtagatgttttaggtcagactcgccagatgctacacactcaccaatgttccatcagatagaagggcttgttgttggaaaagatgttactatggcagaatttaaaggaactatggatatcttcgttgaaaaattgtttggttctgatatcaaaactaagtttagacctcacaacttcccatttacagaaccaagtgcagaggttgatgttacttgtttcaaatgtggtggtaaaggttgcccaatgtgtaaatatgaaggttggatagaaatattaggttcaggtatggttcatccaaatgtgcttagaaattgtggaatagacccagaagtttacagtggatttgcatttggagttggggttgaaagacttgcaatgcttaaatacgaaatagatgatattagattattattcgaaaatgatatgagattcttaaatcaattttaattaggagggtatgtagatgttagtatctttaaaatggcttagagactatgttgatatagacatggatgtaaaagagttcgctgataaaatgacaatgacaggaactaaagttgaaacaatagattattatggtgaagaaatagaaaatatattggttggaaagattttagaaataaaacaacatccaaatgctgataagttggttgtaactaaagtagatattggagataaagttgttcaaatagttacaggagctacaaatatatcagaaggagattatattccagtagctgtaaatggttctaagttacctggaggagttgaaatcaaacagactgatttcagaggtgaattatcagatggtatgatgtgttcagcagctgaactaggtatagatgaacattacattgaggagtataaaagaggtggtatatatattttagaccacgaagattcttatgaattaggaaaagatataaaagatgttttaggattaaaagatgctttaatagattttgaattaacttcaaacagacctgattgtaaatgcatgatgggtatagctagagaagcagctgcaactataggaacaaaagtaaaatatcctgaaatcgaagtaaaagaaagtgacgaagagatagatttcaaagttgagatagataatccagatttatgtagaagatatgttgctagaatggttacagatgtaaaaatagaaccttctccatattggatgcaaagaagacttacagaagcaggagtaagacctataagtaacatagtcgatataacaaacttcgtaatgttagagcttggtcaaccacttcatgcttttgatataaatcaagtagagactggaagaatagtagtaagaaatgctaaagatggagagaaacttgtaacattagatgatgttgagagaacattagataaagatatgctagttataacaaatggagaaaaatcacttggtttagctggtgtaatgggtggtgctaactcagaaataacttctaatacgaagactgtactttttgaaagtgccaatttcaaaccagaaaacataagaatgacagctaaaaaagttggtattaggtcagaagcatcttcaagaaatgaaaaagacttagaccctaatcttgcagagatagcagcaaatagagctgcacaacttgttgaaatgttaggagcaggaaaagttttaaaaggtgttgtagatgtatatccaaataaaccagaacctaaaaaattggtagtaaatcctcaaagaattaaccacctattaggtgtagatgtaccaatggagcagtttgtaggaattttagaatcattagagtttaaatgtaatttggtagctaatgataaattagaaatagatgtaccaagctttagaacagatatggaacaagaagctgatgtatgggaagaaatagctagaatttatggatttgagaatataccttctgtacaattagaaggaaatacgacagcaggaattaaaacttcaaaacaaaaattcatggatgctttaaaagataattcaactgctgtaggattaaatgaaatattaacatattcatttgtaagccctaagggagtcgataagataagagtaccagaaggtaatgctaagagaaactttgttaaattacttaacccattaggagaagaaacttctgtaatgagaactactttaataccaaatatgttagatgttttatcaactaatgtatctcataaaatagaagaagtatctgcatttgagtgtggacatatattcatcccacaagattcagaattacctaaagaagaaaatagaatgtgtgtaggtatgtatggtaaagatgttgacttctttgcactaaaaggaactatagaaactatacttgtaaatgtcggatttaaaggttatgaaattgaacctcaagataataatactaccttccaccctggtagatgtgctaaaatagtgtataataataaatatgtaggtacattaggtgaattgcatccagatgttatagaaaactacaatctaggtcaaagagtttatgtcgctgaaatagatattgactttgtatttgataattctgatagaacaaagaattatgtgccattaccaaaatatccatctacatcaagagatatagctcttattgttaaagatgatgtatttgtaaaacaaatagaagatataataaaggaaaatggtcaaggattagtagaaagctacaagttatttgatgtttacaaaggttctcaaatagaagctggatacaagtcaattgcgtattcaataacttatagaagtaaagataaaactctaacagatgaagatgtagctaaggtgcatgataagatattaagtgaattaagcgaaaaattaaatgctaacttaagatcaaattaacaactaatgtcgggggaggttaggatgaacaaagtaatggttaaaatccatggcgctgaatatccaatggttggagacaaatcagagaagtttatgattagtattgctgattttgtagacaaagaaatggataaaataacacgtcaaaacccgaaattgagcttatcagttgctgcgatactaactgcattaaatatatcagaccttttatttgaatgttcagatgagaatgagaagttgattaaagctaatgaagaattgagtaagaaggttggagcatctaatgaagagcttcaattagaaatcaagtctttaaagcttacgatagcagaaaaagaagcagaaaatcgtgaagctgagactaagatgaaagagttaattgagattatagaaaataaaaagcaagaaatattcgaacttagtaatacgacagaaggttctagagcagagttagatgtttataaaaacaagattgaggagttaagtactcaacttgaagaagcaaatgaaagagctactatagctgaaaacttagcttctgagtttcaaaacaaagcttatgatttacagttaaaatgtacagggttaaataatgatgcaaaaaatgtggaataaactaaaagatttgctgtctcttgttttttgagacagcttcttttaatgtataaatataaatgctatataaatatagctaatgtttaaatgtaaataaatataaatgctatataaatatagataatgtttaaatgtaaataaatataaatgctatatagatatagataatgtttaaatataaataaatatgaatgatatataaatacaaataatgtataaatataaatgatgtataaatatagataatatttaaatataaataatttttttatatcaatgaaaaatagaatctaaaatgattttgattttgtatctatcattagaaagcgagaggtttatatatgacaagcaagagtcagatgtctgaatcattctttttatgttctttgttggcaataacaggaggatttttggatatttatacttatgtggtaagaggtaaagtctttgctaatgcacaaactggaaatatagttttatttgggcttaatatagcagaaggtaatgtaaaggaatcattttattatttgattcctattttggcatttatgttaggtgtatttatagccgagaagataagaaagtattttacaaataataagacaaagattcattggcgtcaggttatcattataattgaaatgattacaatacttattgtttcatttattcctagaggaagatttaatatgtttgtaaatgttgctatttcttttatttgttcaatgcaagtagagagttttagaaaagtaaatgggaatagttttgcaacgacaatgtgtactggaaatttaagaagtgctacagaaactttatttcattatatacatactaagaatatttttatgataaaaaagagtttacagtattatgctattattatattctttatatctggagctattttaggaactttttttacaaaaattttcgtggaaaaatcaatactaatatgtttttttattttggcagtggtctttggaattatgtttatcaataaagatgattcatttaatgaaaattaactttctgtaaatttacaaaaaaatgaagctgttatttgatatactttatatatagcaaatattgtatagattaattaaagaatttaaaatatagtaagcaatatataagttaatagaagtattttaagtatagtaagcagtgtataaattaattaaaatgtcttaagtatagtaggcaatatatagattaatagaagtatttcaagtatagtaaacagtgtacaaattaattaaaatgttttaaatttagtaagcagtatataaattaattgaagaatttaaaatacagtaatcaatatataagttaatagaaatatactaaatatagtaaataatgtatatgttaactcaaatggaccaaatataaataactaatatataaattaattgaagaatttaaaatatagtaagaaatatataaatttaatacaaatatttaagttatagatataattatattaacctaacaagtataaatagaggagaaaaatatgaaaaaaatagaattacttgcaccagtaggctcttttgattcattaaaagcagcagttcaaaacggagcaaatgctgtgtatttaggtggtaaagactttagtgctagagcatctgcaaataactttgatagaaatgagctgattgaggctgttaaatactctcatataaggggagtgcaagtctttgttactgtaaatacattgataaaacagtatgaaatagaagattttgtagagtatgtaaaatttttatacgatatagatattgatgctttaatagtacaggatataggaatggcaagacttataaaaaaactattacctgactttgaactacatgcaagcactcaaatggtagcacattccttagaagatgtaaaataccttcagagtgtagggtttgatagagttgttttagcaagagaattaaatgttgatgagataaaatggatttgtgaaaatacaactgtagatatagaagtttttgtacatggagctttatgtgtatgttactcgggtcaatgccttatgagtagtatgataggcaataggtctggaaatagaggtaggtgtgcacagccatgtagacaaaagtatgagttgatagatataaatacaggagaagtagtaaaaagtaatggagattatttgttgagtcctagagatttaagtactatagaagatttggataaaataattgaaacaggtgtattatctttaaaaattgaagggagaatgaaaaaaccagagtatgtagctactgtggtttcaggatatagagaagcgattaatgaatttgtagataagaaaaaaataagtatttctgaggaaataataaataatttgtataccatatttaatagaaagtttacaaaaggatatatattaggtgaagttggtaaggatataatgaactctaatagacctaataatcaagggctatatattggaaaagttttagattataatagaaagaacaaaagacttagagtaatgctagaaaatacgcttaagaaaggtgatggaattaacttaggtggaggtactattggaagaataataaaggatggagagataactacaatagcacataaaggggatttgatagaattagattttgttggagaagcaaagagaaatcagcttatatataagacttctgacagcgaattaatgaatagagtacaagctacatttcagcaagataaagagttcataaaaactaatatacgtgcaaaagtgagtattaaactaggtaaaaagccagagctttttataagtgatttttgtggaaataaatcggtggtagaaggagacaaaatagttgaaaaagctataaaggtggctttaagtaaagaaaaaatagaaacacaaattcaaaagcttggaaatacaccatataagttaaaagagatagaaattgacctggatgaaggtgtaagtatgcctataagtgtgttaaatcaaatgagaagggattgtattgagcttttagatgaagaaagaataaagataaaagatagaaaatttaagaagaatagattaaaataccaaccaaatagagtaaataaacagaaaaaacttgatacagttcctaagattagagttaaagttaagaacttggagcaattagaagcagtattaaattataatgtagatttaatctattatgaagatataaatacattatcaaaagctttacaaatggcctcaagtatttctatagattcaagtatttctatagattcaagtatttctatagattcaagtatttctatggatttagatacttcttcgtctttaggtattcctaaagaactaatgggttcaaatacaaataacatagatactttgtcaaatacaagtaaaatagatactttgaataagaaccactataatacagcagtcactgacaaaaaattaatctattcagcaccaaggattgttagaaataaagagtacaagcaatttgagatattggataatataaaaggaattaataaggttcaaattggtaactggggctctatggaatactttaagaaaaaagacttaaatatagattgctacttaaatgcattcaatagtgaaagtataaaccacttcaaagaagagggagcaagtacagtttgtttgtcacaagaactaaacttaaatgaaattaaacaaactttaaaatatacagatgtagaaattgaagcagtaatatatggatatgctcctatgatggttacagaatactgtcctatgggagtagttgttagagattgtaaaaaggacaagagagttgctaaatgtaaggaaagtagttatgctttaagagactttacggatgcaagttataggataacacaagatatattctgtagaagtacaatttacaattcgaaggttacttgtatgttggacaatctatatgagttagaggaaattggaatagatgtatttaggatagattttacagttgaagatagtgagatggttaaaaaggttattgaagctcacattgaggtattgagtaataattataaacttggaaaaaaggctacagatttgtataagaaattagatgaaattggaacagttgcaggacactactataaaggtgtagaatagatataacatgaaaaatatacatgaatatatataaagacttgaatttatgtgtattaatatataaaaatatcatatatgtgaaaaaacagggggattggtgaaaatgagagaagaagctttagaaattttatttaagtatttagaaactgatagaatgagaaaacattgttatgctgttgaagctgttatgagagaattagccaaaagactagagccagaaaaagaagaagagtgggcagtggcaggtcttttacatgatttggattcagatatagttggaagaaagccaggagaaatatgtgaaggacatgctacaacaacagtagaactgcttaaaaaagaaaacttcggtgacgaagaaatgtatagagcaatacttggtcatcatgatggaatgggagttacaagaactagcttaatggaaaaagcaatatatgcagcagaccctataactgggtttataactgctatagctttagtttatccagataaaaaacttactagtgtaaagactaagtctgttattaaaagaatgaaagaaacgagatttgcttcaaatgtaaatagagatgcaatgagaagtatagaagatatagggattccatttgatgaatttgcagaactttctcttaatgcaatgaagaatataagtgatgtgcttgaaagtgctgaaaataattaattgagaatataaagagaaagtaaggcgagatacatgaaacttacaactatttgttatatagaaaaagatgacaagactttgatgttgtacagaaataaaaagaaagatgatatacatgaaggtaagtatgtaggagttggaggaaagtttgagcaaggagagactccagaagaatgtgtaattagggaagtaaaggaagagactggtcttactcttaaatcattgtcatataaagggttgataacttttccaaaatttaaagatgaagaagattggtatatgtttttgtatttctcagatgagtttgaaggtgaattgtctgaaaaagatttaaatgattgtaaagaaggaaatttaatttgggttggtaatgataaaatattcgatttaaatatgtgggaaggtgacaggttgttcttaaattgggctaagactggaaatatctttagtgcaaagattgtatatgataatgggaaactaaaagattataatgtaagtttcttagattaattaagatatagtttttagattaattaaaatgtagtttaatgatatattttaagaatataatttaaagatattacttaaaaatgtaatttaaagttacatcaaattaaaatgtaacttacaggttatagcaaattaaatttattgatataatattaaaataaacaatagtagttgggaaaaggggctatctcagtgcataaagatagccttttttagtctgtctacttaacaaggacatatccaaaatagaggtaagccttttttattgttgaaatgataaatatccacttgatttcatacaataaagaatgtctcattaactaaaaagttcacttttagacatttacttcttttatcttttattttgaataaattctaatttaagttctaattttatgtatatttttctccattaaagtgtagttaaggctagtatattgttaaaaaaataaaaattgacttagacaactatttgttttatactaaagtaaattttttaaaaggaggaataatttggaatgatagacataaatttagaaaaatgtgtaggctgtgggatgtgtgaatcagactgtcttgtaaatgcaataaaagttaaggatgataaagcaaaggttaaaaatattctctgtattaactgtggtcactgtatggcaatttgcccaacagatgcaatagaaatgcaaggatttgataaaaatgaagtaatagaatacaatcgtgaaagttttgaattagaacccgaaaagttattgaattttattaaatttagaagaagtataagacaatataaagatatagaggtagaagaagaaaaaataaaaaacatagtggaagctggtagatacacaccaacaggtggtaatagacagcctataagatacatattagtaaaagaaaagctaaaagaagtgaaagaactggcaatacaaggtctttataatttggcattagatactgatgacaatgaccctgtacgttctatctataaaaatacatttaagaaaatgtacaaaagatataaagagaacggaaatgattctttattttatgatgccccactacttatgatagttgtaggtgatatgtctctaggtggaagtgcttatgtagatggaggattggctgcatctaatatggaacttatggcctattctcaaggattaggaatttgttataatggattttttgttatggcatcaaatgtagagccaaagataaaagaactgttaggaatgagcgagaacgaagcagttatcacttcatttatattgggttatccagatgtgaaatataaaagaactgtaaatagaaacactgctaaatttgaaatgagatagaacttaaacttcattacaacttgtaaaattatgggatatagagtaggtatttagcagggtaaatttgttgtaatagatatataaatgagttataatttaaatatattgtatatattaaggatatttaaatttctaagtagatttatatatccttttatatactaatctattttttcatgtctacaagtttatgcagtaatttatactgtaaatcttaactatatggaggattgtgtagtgaatttaaaaaaattacttttattaattattgtaattacatctatattcacttcttgcatattttcttttggtatcaatgctataggtaatgataatcgtaccattcgtgttgcttatcctattcaaaaaggtttaactgaaatagatgagcaaggtaactattttgggtatacatatgaatatttgctagaaattgcacagtatactggatggaattatgaatttgttcaagttcctggagagataaatgaatctattacaaaattaatgaagatgttagaaaatggtgaaattgatataatgggaggtatgttatacaatgagccaatgcaaaaaatatataattatgcgggaaacagttatggagtagcaaatacagtactacaagcattatatgaaaatacagatattgataacataatgagttcgcaagatgtgaaaaaaattcgtattgctgtaatagaaaattctgatactaggcttaaagaattagatgagtattgtaaaatgaatcttatgtcacctgaattggtatattgtaaaacaagtgacgagcaattagaagtactaaagagtggtaaagcagatgtacttcttaatgttagtatgaacccaatagaaggtgtgcgtactgtagcaaaattctcatcaaagccattttatttcattactccaaaaggcagtacagacttaactcaaaagcttaattcagcaattaataatattgaacagaaggacccatatttttcaactactttatatgagaaatactttacgccagagaataatcaaatgtttttatctgatgaagaaactaattacattaaagatacagaaaaattaaaagtaggagtacttttaaacaaaccaccgtttcaaaatgcagataaagatacaggagaattaagaggtatatcaattgatttgttaaatcatatatgtgataaaacaggtttggaatttgaacttgtgcctgtaaaatctcaagaagatttggaagatatggctaaaaaacatgaaattgatattgtagcaggaatgatttatgattatgagtactctcgtgaacataatatagctatgtctcggccttttctttctactcaatatactatgatgattaataataaattaaatgagaatagtctaaatggaaagcgtatagctctagccaaaggtattgattattatggtcagtttgaagaaaatatagtttggtatgataatttagaagagtgtatagaagctgttaataaaggctatgcagattacacttatggagaaggttattctatgcagtactatatgaatcaacctaagtataaaaatgtgcgcctagttcctcaaacttatgaagcaaagagtatttgttttggcataattaaaaaagataaacaagaattattgaatatatttaataaagctattataagtatttcatcagaaaaaatgcaatcaattgtctaccaaaatactacatatagacaagatttctcgttgctttatattatgcaacagaatccaattgagactatttttattgtagcaagtttattaatttgtattattggatttatggcatttggtttacatactcgtacaagtatgaacgaaaagatatctttggaactcaaaaaacatactcagttgtatgaaatgacaagtgaatacttttttgagtatgattataagcaagataaattgataatttctatgccagaaaagggtattgagacttattatggtttggataaaagtgataaggaaagtgaaaatggcaatatagaaaatgaaagagataaaataagaagagaatataataaaaagttttttgatgtaataaaatcacaagaaaatgggactactgaaatgtattctatcatgcttgatgatacttttcattggattagaattacttcaaaaataatttataatgatagaaaaataccaatgtatgtaattggtaaaatagctaatattgattctgaaaaagaggaaaagaatagattgttggataaagttcaaagggatagtttaacaaatatttataatgcagcatatattagaaaattaactacacaaaatttattaaatttatcaactgaaaaaaatggagctttattgattatagatattgattattttaagtcaattaatgatacttatggtcacctggtaggagataaagtactgattgatgttgcaaaggtacttgatgaaagttttgcaaaagatgatatagtaggtcgtttaggtggagatgaatttagtgtttatataaatgatataataaataaggaagaacttatcaataaatgtaatgatgtatacaatcatattcatctcattaagttgccaaatggagaaagtttatctattagtatgggggtagttataacaaagcgtggtcaagagtatgatgaactgtatcaaatagcagataatgctctttatgattctaagagacaaggaagaaatagatttaaaatagtataagaattaattttaaaacagaataaagtttaataatatttaaattacaataaagcctaatgatacatgttattatctatcattaggctttatttctataagttaatattgaaagtaaatattatactaacagtagtattaatttacagagttaattttatatagattacttaaaattaaaatctatttagaatcaaaacttaaatttaatattggttcatagattttaatatttcaataacataatcccaaacattagctacagaagggatactaacatgttcatttggagtatgaacatcaaacatatctggtcctatagagatagcttcagcatgaggaagtttatcaagtaataatccacactcaagaccagcatgtagagccataacagtaggaactttaccagttaatttctcataagtttcactgcatattttttctaattttgagccttttttaaattcccaagctgggtattgagctataaggtcgtaattagcacctaaagcttgagccaaaagtcttattctatcagcgatttcatctctaatagacataacagaacttctaacagaagttaaaaattcaatagtagattctttagtttcaattatagcgaagttagtagaactttcaactaatccttctatatcaagacttactgattgaactccatgaggagttaagcaagacatttgaacaactttttctttacaatctttagtaagaactttgtctacagaagtttcagctactgagtaagtcatgccagggtcagaagtagtaaactcatgtttaaatgcagttaaaatgtcatttatttgttttttagcagattcaacatcagctttattaacagctattacacatttagcttcacgaggtatagcattgtgcttagtaccaccatcaacagaagctaattcataatcaacattcaatacacttaatactctagctattgctttgttagcatttgctctttgtaaaacaatttccataccagagtgtccacctaatagtccagtaacctcaactaataatccttgtttgtcacctttaacttccttgtattcaacaggtaaactaacaacacaagttttaccaccagcacagctaactaataagtatccttcctcctcggagtccatatttaggatatattgacctttaattaagctagggtctagtgcatctgcaccattcataccatcttcttcattaacagtaactaaaacttctagtgcaggatgctctaaagtattatcttctaatatagccatacccatagcaacagctataccattgtcagctcctagagtagttccagtagcatatatcatgtcaccatcaattcttaattttatagggtctttaagaaaatcatgttcaacattcttttctttttcgcaaaccatatccatatgtccttgaagaactacacctggacaattttcatatccttttgtagcaggctttcttattattatgtttaagctttcatcctgaatagtttcaagacctaaatttttaccaaagctaagtaaaaaatcacttatgcctttttcatttccagaacctctaggaatttgagatattttctcaaagtttttaaaaacactttctggttttaatccttctaatacgtttcccatgactcatgttcctccttaatttatctatataagtagctatttttttataagctaaaataaactcctttaaaaatattaaagaagattttttaacagattatattacaaataaagcatgtttatgtataatatatagatagctacatacatagtataatacaaaatatgtgtaaaatatatctaaaagagaaaaaatataataattttagaaatgaaaaagaaataaaacttgcattttttattggaaatgcttgaaaacatacatttttaaaattaaataaaaaagttaaaatatcgaggatggtgaatatagaaaatgaatgagaaatcgttaagagttctagaatacaataaaataatagatttgttaaagaagaaagcctcatcttctttaggtctaaaatatatagaaaatttagtaccaaatactgattttgtagaagtgaaatctatgctagaagaaactagtgaagctcaatcaattattataaagagaggttcagtagggttggaaggtattcatgatatagaagataaggtaaagagagcttatataggtgcttctcttgacccaggaagtctgattatgatagcagataccttaagagtggctagaagattaagaaatagcttatctagtagtgatgaagaagattttaattatccaataatacaatctctatcaaattctctatatgtgtacaaggacatagaagaccagatatacaatgctataattagtgaagtagaaatatctgacaatgcttcaagtacacttagagatatcagaagaagaatagcccaaaaaaatcaatccattaggtcaaaattaaattcaataataagttcaactacttatcaaaagtacttacaagatgcaataatttctctaagaggtgatagatttgtagtacctgtaaaatctgaatataggtcgcaagtagctggtatagtgcatgaccagtcatcttctggtgcgacactttttatagagccaatgactatagtagagatgaacaatgaattgaggcagttgaaactaggagagcaagaggaaatagaaagaattttatcagagatttcagctatggttggagaagtgagcgaagatttaatctctaatcaagagatacttggaagattggactttgcattttcaaagggaaaactttctatacagatgagaggaatagaaccaactttaaatgaggataaatatttaaacataaaaaatggaagacatccactgctggataaaaagaaggtagtagcaaatacaatttatttaggaagagacttccatacattggtgataacaggtccaaacacaggtggtaagactgttacaataaaaactgtaggtctatttgcacttatgacacaaagtggacttcatatacctgctgattatggaagtagtatgtgtgtatatgataatgtatttgcagatataggagatgaacagagtattgaacagagtctatcaacattttcatctcatatgacgaatatagtatctatattacaaaacgtaacagcagactctttagttatatttgacgagttaggagcaggaacagaccctgttgaaggagctgcccttgcaatagcagtattagaagatataaattctgtaggagctaaatgtatagctaccactcactatagtgagcttaaaaattatgctcttactaaaccaggtgtagaaaatgcagcagttgaatttgatatagaaactttaagcccaacatataagttacttataggtgttcccggaaaatcaaatgcgtttgagatttctagaaaacttgggctaagtgattatgtgatttcacgtgctaaagaatatataaatacagaaaacatagctttagaagatgtgttacagaatgttgaaaagaatagaatcaaagcagtagaagatagagaagaagctgaaagattaaaagaagagattgaaaaactgaaagtagagtatgacgaaaaacttgaaaaattggtcagtcaaagagataagatgattgaaaaagctaaatcagaagcattttcaattataagacaagctaaagaagaagtagatattataataaaagaacttagaaatcttgaacaagaaagagcttcaaaagaaaagaatcgtaagatagaagaacttagaaaagaattgaccagctctatgggaagtcttcagccaacagtaaaaagtatgatagttccaaaggtatcaaataaggagataaaagacttaaagccaggtgaagaagttaaggtaataactttaaatcaaaatggtagtgtagtttcagtagataaaaagagaaaagaagcagtagtgcaaattggtataatgaagatgactctaccttttaaatctttacaaaaaacacgcaaagatgtttcaacaaatgtaactaaatcaacgagaaacattataaggtcaaaatctggtagtgtaaaaaatgaagttgaccttagagggttaaacctagaagaagctataatggaagtagaaaagtatcttgatgatgcatatgtggcaggtttagagtctgtaacagtaatacatggaataggcacaggagtattaaaagcagggctacaagacattttaagaagaaatagacatgtaaaatcacaacgaggtggtcaatatggagaaggtggagcaggagtaacaattgttaaattaaaataatttgtataagaatacattagtaatttgtataagaatatattaagaatttgtataggagcacatttttatgatattggtatctgcatgtttaataggaataaattgtaaatatagtggcgataataatgaaaatgaaaaagtcaaggaatatttaaaaggcaaagaatttacacttgtatgcccagagcagttaggtggtctatctacaccaagaccacctgctgagatagttgatggaaaagtaattactaaagataataaggatgtaacagaaaactttgtaagaggggctaatgaaactctaaaaatagcaaatttatatgtatgtagcgaagcaatactaaaagagggtagcccctcttgtggatgtaatctaatatatgatggtagtttttcaggtaaaaagataccagggaaaggtataacagcaaggctgttagaagaagaaggaataaaaattaagagtgaaaaagatttatagaaaatagataaaagagtaaaaaaagtatataaagctaatattgatgtataaaaatagataaaagagtaaaaaaagtatataaagctaatattgatgtataaaaatagataaaagagcaaaataaatgtatataaaattaatattgatgtatgaaaattgataaaagattaaaaaaagtatataaagtcaactggatagtacaagaaacaataaaatagaaaaaagtcttataaaaaatcaataatagtgtgattaaaaactgcaattatagtatttttaatatatacagaaaacataattattaaagtgttttacactgtaatgaaatacttgaaaaaacacgaaatttgatttaacataaagagataagcacaatataaaccaggaacaatgtagagaggagcaacagaatgcaagattttaaggtggcaatatcaaattgccttaaagaaaaaatagaagatttatcgaaagaagagatagaggcacttatagaagttccaccaaataaggatatgggggactatgcttttccatgctttaaattagccaaagtgtttagaaaagctccaaacatgatagcaagtgaattggcggaaagtatagaaccaagtggagagataacaaaagtaatacaattaggcggatatgtaaatttctttgtaaataaatctcaattagcagaaactgtaattaaaaaagttttagatgaaaaagaaaattacggacatagtgattttggaaaagataaaactgtaatagttgaatattcttctccaaatatagcaaaacctttccatatagggcacataagaactacagttataggtaatgctttatataagatatatgattcgcaaggatacaagactataagaataaatcatttaggtgactatggaactcagtttggtaagttaatagtggcctttaaaaagtggggagaaaaagaagtagtagagtctaatccaattccagaattactaaaattatacgtaagattccatgatgaagctgaacaacacccagaaatggaagatgaagcaagagcatggtttaataaattagaaaatggtgacgaagaagcacaagaattatggcaatggtttagaaatgagagtttaaaagagtttaacagagtgtataaacttttagatatagaatttgattctttagcaggagagagtttttattctgataaaatgaacagagttatcgaactattagaagagaaaaatcttttaaaagagtctaaaggagcaagaattgttgatttagaagagtataaaatgccaccagcacttattactaagaatgatggttcaacgttatatatgacaagagatttagctgctgcaatatatagaaaagagacttatgattttgacaagtgtatatatgtagttggttctcaacaaaacttacatttccaacaatggtttaaggtaattgagcttatgggatatgattgggcaaaagatttaattcatgttggatttggtatggttgcacttgaagaaggtactatgtcgactagaaaaggaagagtagtatttttagaagatgctttaaatcaagctatagataaaactaaggaaattatactagctaaaaatccaaatgctaaaaatgtggatgaaatatctaagcaagtaggtgttggggcagtagtattccaagagttatctaacagtagaattaaagactataccttctcttgggaaagaacgcttagttttgatggtgagactggaccatatgttcagtatacacatgctagatgctgtgcagttttaagaaaagcagaagtagaagtgacttctgatatagattatagtctattagctgatgaagatagtgcagaagttcttagagttatagaatcattcaataagaatattttacttgctctaaagaaaaatgagccacatatagtgactagatttatgttagatttagctcaagcgtttaataaattttatcatgacaatccaattttagtagaaaatttggaaataagaaaagcaagacttgcattagttttagcaacaaaacaaactttagaaaattctctgaaattgttgggaatgcacgctccggaaagaatgtagcatgataaaatgttgaaataaaaagaataaaattgaacttagtacgcaatttgtataactgtaaaatatagggatgtcgaaaactgatgctttacatataaaaaagtagtatcgtataataatatatagatagtagattacaatgatttttgtacactactatccccctatatatgacagcttcttaaacgggctgtctctttttttttaataacaatttatttacattcaatttttcagaaaggatatatttatgaatgacgaattactaaaaaaagtctacacatcttcttttagtagtgcaagtagggctcttaaagatttaactataataaatacaaaatccttaatagatgataaaacgcaaagatgtgtgtatatagacgaaaatagactgagagatgaacttatttactatagattttatggagaaaaaataggaaatatcaattttttaaatattttactaccactaattttatcaaatactaatattcaaaaaagcgaagatgaggttattaaactaataaaaaagtatgttatttattttaaaaaagaagaacttttatttgattatttattaggttctgtagtgtataattccattatgcacaatcttataaataatagtaaaatagagtatgtcgaattactacagagtattaaagacaagataataggattttctatagaattagacaaatcagatgttgtaaagtttcagatggcaaggattaaagcaatacaattaattgataagtacattgatttgaaatctgaagattatgatgaagaaagtattttattaaatgttttaaatgttctatatgatgtatatatggaagatagaactgtagaaaatgaaggaattaatagcataaaaaaatctatattatccattttgggtgaagatagtaaattaaatgaagataatatagattttattttttctatgtccgaatatgttgttaaattgagaaaatataaaattggagttaaggcatataataaaagcatagacccaagaagtcttataagacttgaagaaggtaatactataatagaccctatatttaatcaaataacagttatgtcgaaaacctttaatgataatatattaagcataaaaataaattctaaatcaggtatttatatattaaagtttaaaaaggtttaggttattagagtgtgctatttttttctagataatctaaaaaatctttttccttagtgtcagttaaaaaacataattcctttactatattattcctaaggtcaatgaaatcactaatttgagtattttcattagtgtattcaagagactttataataagtagtaaatctctttttgataaagagttgatagatactttttcaattaattccataaaaaacttcctttcctcacattacttgaaattaataaattaattatatagatattatttagactttacatatactattttaacctataaggggtacaaaaagacagtataatcttaaaaagaggtgagaaatatttgaaaattttattaacaacattaaattccaagtttattcatacaaatttggctataagatatctaaaagaatttgtaagagatttgatagaagttaatatgaaagaatacacgataaacaacgatttggactatattttaaaggatatatataaaaatgaatatgatataatattattctcaacatatatctggaatgtgggagatatagttaaactttgtgataatctaaaaaaaattagacctaatactaaaatagctttgggcggaccggaagtgagttatgatagttatgaggcaatgaaaaagtatgattttgtggattatatactttatggagagggagaattaatttttagagacttagtacttcacttgcaaggaaagatgaaaataaatgatgtaaatggacttgtatatagacaaggcaatgagataatagtgaataagcctatggaattacttcaagatttggatgagattcctagtccttatgaaaacttgaatccaaaagaatatgaaaatagaatagtgtattatgaatcatcaagaggttgtccttttaactgccagtactgtttatcatctactattccaggtctaaggtattttagtttagacaggataaagagtgatttaaaagctttaatagatgcaagagtatcacagataaagtttatagataggacattcaatgcaaatagaaaagtggctatggaaatcatggatttccttatgaaaaatgataatggatatacaacttatcattttgaagttacagcgtatttgatagatgataagatgcttgagtttttggctgattgtaaagaaggtctttttcaatttgaaataggggttcagtcaacgaatgaaaaaacacttgatgcagtaggtagaagggatgattttaaaaagttgtctcatgttgtacaaactgtagcatcttatagaaatatacatcagcacttagacttaattgcaggactgccttatgaagattataagagctttgaaaattcttttaatgatgtatttaatctaggtatagagcatctgcaattaggctttttaaagatgattaaagggacaggtatgagaaaagttgcagatgagcatggttttaaatataaggattatgctccatatgagtttttatacaataattatataagctatgaagaaactttgaagctaaaggatatagaagatatactggagagatactacaattctaaaaactttgtgttatctatgagatatattataggcagattttataaacaaagtccttttaaattctttgaggtttttgccaagtattttgatgaaaatggctactttgatttggcacaaggaaagaatcagttatataaaatattgatggatttctataatgaaaaaatcaacatagataatgatgtattcaatgatatattaaaatatgactatatatcactgggtaaaacatcaaatataccacagttttttaataagctagatgtggatgattttaagaatagatgccatgtatttttacaagataatgataacttatcaacatatttacctagttttgttgataaaccagctaaacatataataaaatatgttcattttgagccatttagatttaatgttgtggatttaaaaaatgatataaatacagaaataagagaagtagaaaatgtagtcttatttgagtatgatgataaaaaaatatttgagaaatctaaaactcataaagtagagatttaagtatttaggaggataaaatggattttaagatagaaaaatatttgctaaaaaaagcagaagaattagcttttataactataaaacatggtggagagtttaaattaaaaagctataaagtgccaaaaggcggattagatgtacctataaaaaatgaggtattagtaaaagggataaaagaaaagactgctcaagataagttaaattcaatgtctatagcagatgcaatgatatatataattggaatagatagtaagtttaaaaacaatgcagagtatgagaagtttttaaatgctttatcaaaagatattgatttggatttgaaatcgtatatgggatatatgtcgagaaaatactttgagattggtgaacatacagattctttaatatatataaaagcatttataacaatgtatccagatgatttagatgcaatgtataactatgcgattgtttgccaagagatagctaaacagtatcaaaaagatatggatgataaggcaatgaatgcattcttacttgaagccatggctaagcttgaaaaggtaattgatgttgatgagaattttgcattaggttattatcacttaggctaccattattataatcaaggtcaatatttaaagactaagctgacttgggaagaagcattaaggctagggttagatgctgatttagtagctgaggtacaagagaatctaggcaagatggactttaaagttcaatatgaagaaggatatacacttgtattccaaggtaagtttaaggaaggattagagaagttacttccattagaagaagaacatatggattggtggaacttgctgtttatgatagcacttggatataagggtatgggcgaaatagagcaggctaagatgtatcttgagaagatattgataataaagcctaatcaggtggatactatagtggaattggggctttgtgaggcttataagaataatttagataaagcaatagagtattttgaacaagcggctaagataaaggaagacccagaaatactttgcaatttaggaatggcttatttaaataatggtgatattgatgatgcaacttactatatagaaagagcttatgaattaaatccacaagatgaaattactattgcttgtctaagagaacttggaataaataagtaaggatattgttaggttgtatttaattttatcggttaagtggggctatctcaaaatagagataagcctcttttttgtatgaagagttccaggagttactattggagataatgcaattatcgctgctggagcagttgtaacaaaaaatactattgtaggtggtgttcctgcaaagcttttaagagctattgatgaaatcccagaataaaatattaaactgtcttttagtcatataaattctttataacataaaaaataaattgagaaaaggtatagcaaatatggtattatttagttaaatatatataagggaggggttacttttgataaaaaaattagatgatattttagaacaacttaagggaggagagaaaattgtactctctgtagcagcagctcatgataaagaagttttaatggcaataaaggatgctgtagaaagaaatataattactcctatattggttggaaatgaaggcaaaataagagaaatatcaaaagaaataggatttgatttaagtggtatcaaaatagtggataaggatgatatcaaagagtgtgcagaaatagcagttaaattagtatcaagtaaagaagccgactttgtaatgaaaggattattagatacatctgtcatattaaaagaagtgttaaataaagactatggtcttagaactgatagtttattaagtcatgttatggtatatgagttagaaaaataccataaattacttataactacagatggaggtatgaatatagctcctgattatgaacaaaaggcaaagatattaaaaaattctataaaagctgcaaaagctttaggaatggaaactgtaaaagttgcatgtttggcagctaaagagaaagtaaatcctaagatgcaagcaactgtagatgcagatatgttagcaaaagcttgtaaagaaggagaatttggtgaaaatgtaattgtagaaggtcctctggcttttgatttagctgtttcaaaagaagctagtgagataaaagggtttaaaagtgaagtatctggagatgtagatatcatattggttccaacaatagaggttggcaatggaatagggaaagcctttacatatatggcagactctaaatcagcaggtataattatgggtgcaaaagctcctatagttttagtgtcaagagctgattcacatgaatctaaattatattctattgcatatggggctattgtagctaaaaatatgaaataggataaatcgcttgaaataaatgaattaaagtagaaaaaatagtcaaaatgtctaaattaatgctgtattaaaaaagttttatataaaaaataattatagcttcaaatgaatatatacaaatgttcaatttgaagctataattaatattaaagtaggaaaaataaaaaaattcaaaaaaattagtccaaaaaatgctattctaagaagtttttactaattaagtttagggagtaaaaatctgtaataagtccaaacagtagtgaaagataataaatacacaaacaatctgcaataatataaaaatgactagaaaaatttcaaatttgatttaaaaaaatcaaaacataatttaattaaactgaagtatcaaaaaagtaggtttagatattaacaaatagccaaaaacaagcgataaaatcaacttaaattaagtgtagaaaataaaatttttatgtattatctaattttgttaaaaaaatatttaaatctaaagcaaagcactgaaaattagtatataatcaacttagaaagcatttattttattattttatgacatgaagtcagtcacctgggggattttaaaaatcaaaaaaaggggataggaatatggatgaaaaaatgttaacaattgatttaaacagccagaagatgatagctaaagctagagaagaaggcgtagaaacaatgtatgatagaaaagaaggctttaaggcacaatgtggttttggtcttcaaggtgtttgctgtagaatatgtggaatgggaccatgtagaataagccctaagactccaagggggttatgtggagcagatgagcatactatagtaggtagaaactttgcaagaatggttgctggtgggacagctgcccattcagaccatgctagagatatagcacatacattagcattagctgatccaaatggaaactataaaataagagacgaagctaagttaattactttagctaaagaatgggatgtagagacagaaggtagagatatctatgatgtagcacatgaagtggcagaaattgcattaatggaatttggaaaaccttttgggacattaagatttataaaaaatgcaccagaaccaagacaaaaaatatggaaagaatacgctatagagccaagagctatagatagagaaattgcaacaataatgcactctactcatataggatgtactggtgatatagatagtttaatacacatgagtcttagaacttctatggctgatggttggggtggttctatgataggtactcgtctaagcgatatcttatttggaactccagtgccaagaagaacagaggctaatttagcagtattagaagaaaataaagttaacataatattacatggacatgagccagcattatcagaaatgatagttttagcatcagaagagccagacttagtagctttagctaaagaagttggtgctgatggaataaacttagcaggtatgtgttgtacaggtaatgagattacaatgagacatggtgtaaaaatagcaggagacttccatcaacaagaacttgcaataataactggagcagttgaagctgtaatagttgacgttcaatgtatattccctgcattagctagagttgcagattgttaccatactaaatttgtaacaacttctccaaaagctaagataacaggttcaacttatattgaatttagagaagaacaagcacttgatgatgctaaagcaatagttaaagaagctattttaaactttaaaaatagagataaatcaaaagtacttatacctgaattaaaatcaggcgcaacagttgggtatagtgtagaagcagtagtaaatcaattagacagagttgtaaactctcatatagacccagcaggaacagttaagccattaacagactgtctaaaagctggagtattaagaggagcagctggtgtagttggatgtaacaatgctaaaggagtttcaaatgaggctcacgtaacaataatgaaagaattaatcaaaaacgacataatagtagttactacaggttgtggagcttcagcagcagctaagtttggtttaatggaatctgatgcggctgaaaaatatgcaggtaaaggtcttgcaactgtctgtaaattagtaggaatcccaccagtactacatatgggttcttgtgttgatataagtcgtatactagatttagttggagcagcagctaattacttagatatggatatgtgtgaccttccagttgtaggtatagctccagaatggatgtcagaaaaagcagttgctataggatgctatgttgtagcttctggtatagacacttatttaggaataatgcctccaatagctggttcttcaagagcagtggatatattaactagtgagttaaaagataaagttggagctacatttactgtaaatacaaatccaaaagagttagcagctacaataatagaagatatagagaaaaaacgtgttcactttgaagcattagttgaagaaaaaatggcagaaaaggctgaagcttaaaaaatagtgaagttatagaataaacgtttttataagaagtttctggttgagtaaagttgaataaagtcaaatattaaagtaaagaacatcgaaatataatgaatatactgaataaataaaatataaacaatattaaagaataataaaactatacatgctgctttgaaaagctagtagggtaaatttaattggttcctgtaaggactagctgtagtttatttttagtgtataaaaatatagagtataaaaaatatttaactgtaaaattaactactaaaaagcaaatagtaataaaaggtggtagggattatgaagatagcaataacaggtaaaggtggagtaggtaaaacgactttttcttcaatgctctctaggatgtttgctgaagacggatacagagttgttgctgttgatgccgaccctgatgctaatttagctttagcactaggttttccaaaagaagtatatgaatcaatagtacctatatcagaaatgaaaaaattagtttcagatagaacagctgcttctgtaggttcatttggaaaaatgtttaagatgaatcctaaagtagacgatatccctgaaaatttctgtaaagaatacaatggagtaagattacttacattgggaaccgtagattctggtggtactggatgtgtatgtccagagcatgttcttttgaagagactctgctcacatttaatactacaaaataaagatgtagtggttatggatatggaagcgggaattgaacacttaggaagaggaacagcccaaggtgtagatgcttttatagtagttgtagaaccaggagagagaagtctacagacttatagaaaagttaagaaacttggacatgatataggtgtaaataaagtatttgtagtaggaaataaaattagaaataaggaagatgaagaatttataatccaaaacttagaagatggagaatctttaggatttatttactataaccaagatgttattgattctgatagagctaatcaatctccatatgattctagtgaaacaacgaaagaacagattaaagcaataaaagataaattaatgtcacttaaggataaataaaatagatagaaattttgatttgggattttaagttggttaaaggttagacataggcaatagataggtaataagtaagtaattagataaataactagctattaagtttgaatattttaatagcttagtagctagtttttaagtaattttacatgtataattatcttataaaatataatttttacatattaatacaatttttacaaaaattatattttaaatctatttaggttgtgggaggagattcagttatgggatttaaatctgacattgaaatagctcaagaagctaagcctcaagatattagagaggttgcaaaaaaattaggactaggtgaagatgatgtagaactttatggtaaatacaaagcaaaagttgactacaatctactaaaaagagagactggtaaaaaagctaagttaatactaactacagctataaatccaactccagcaggtgaaggaaaaactactactactataggtgttgctgatgcatttgctaaactagacaaaaatgtattagttgctttaagagaaccatctctaggaccagtatttggtgttaaaggtggagcagctggtggaggatatgcacaagttgttcctatggaagatataaacttacacttcacaggagattttcacgctataggagctgctaacaatcttttagctgctatgcttgataaccatattcaccaaggaaatgcacttagaatagaccctaagaaaataacttggagaagatgtgtggacatgaacgatagacaacttagaaatatcgttgatggtatgggtaaaaaaggtgatggagcagttagacaagatggattcgatataactgttgcttctgaaataatggcagcgttctgtttggcaagtgatatatctgatttaaaagaaagattaggaaacataatagttggatacagctatgaaggtgaacctgtaacagctagacaattaaaagctaatggtgctatggctgcattattaaaagatgctttaaaaccaaacctagttcaaactcttgaaggaacaccatcatttgtacacggtggaccattcgcaaatatagctcatggatgtaactctgttatagctacaagaatggctatgcactttgcagactatgtaataactgaggctggtttcggtgctgaccttggagcagaaaaattcttagatataaaatgtagaatggcaaacttaaaaccagatgctgttataatagttgctactgtaagagcattaaaatacaatggtggagttgctaaagcagacttaaataacgaaaacctagaagctcttgaaaaaggacttccaaacttattaaaacatgttgaaaacataactcaagtatatggattaccagcagttgttgcaatcaatagattcccacttgatactgaagctgaacttaaacttgttgaagacaagtgtaaggaattaggtgttaatgttgctctttctgaagtatgggcaaaaggtggagaaggtggaattgcagtagctaaagaagttttaagattattggatgaagaagaaaataactttagattctgctatgaagatgatttatctataaaagacaagataaatgctatagctactaagatttatggagcagatggtgtagattatactcctgaagctgataaggaaatagctaacttagaaaaacttggatttactaaagttccagtatgtatggctaagactcaatattctttaactgatgaccaaactaaattaggtagaccaacaggatttagaataactgtaagacaagcaacaatttcagcaggagctggatttatagttgcacttactggagaaataatgaagatgccaggattaccaaaagttccagcagcagaaaaaatagatgttgatgaaaatggagtaatagctggattattctaaggaaattaatttataaataaagagtaggagatatcttaaaatagttcgtaaaatatctcgaataatttgagatattttcctacatcctttcaaggaggattatcatgaaaatagcagataaaacttgtgttgattttgtagaagtactatcttccaaagaagcagtaccaggtggtgggggagctgctgcactagtaggtgcaataggtatggctttaggtagtatggtatgtaaccttacaatagggaagaagaagtatgctgagtatgaagaaagcgtaaaagagatattaagtaaggcaggaaagttagaaaaagatttattaaaaatgatagatgatgatgcagaatgtttcttaccattatcaaaagcttacgggcttcctaaagaaacagaagaagaaaaaagaataaaagcagaaacaatggaaaaggcattaaaagttgcttgtgaagtaccattaaacatagtaagagtttgctatgaagctattaagttacatgaagatttagttgataaaggttcaagacttgctataagtgatgttggtgtaggagttcagtgtttaagagctgctatacttggtggacaattaaatgtagttataaatataaattctatacaagataaagaatatgttaataaggtaaaaatagaagtagataagttagttgaagatggtgtaaaaatttgtgatgaagtttatgccaaagttgaaaaagctcttggaaaataatttttaaatgacgaaagtagatactatgttattaatatgtggtatatagaataaattaatttaagtttgcttgtaggggagttgtgaatgtatggaaggaatgtcaactaaaggacaaattataaaaggaaaacctgtagctgataaaattagtgaagaattaataaaagaagtcgatttactagttaaagaaggtataaatcctaaactaacaatagttagagttggggcaagaagtgatgatttatcttatgaaagaggagcactaaagagatgtcaaaacataggtataacaacagaagtgttagagttagctgaggatataacacaagaggaatatattgatgtattaaagagagttaatgatgacaaaaatgttaatggtatattatgttttagacctcttccaaaacacttaaatgaagaagttataaaatatgttattgcaccggaaaaagacgtagattgttttagtccaataaactctgctaaggtaatggaaggggataaaagtggatttccaccatgtacacctacagcagtagttgagatattaaaacactataatgttgatttaaaaggaagtaaggtaacagttcttggaagatcaatggtagttggaaagccagtatcaatgcttttattaagtgaacatgcaactgttacaatatgtcattcaaaaactaaaaatctatcaggtgtagcagcagaggcagacgtgctaatagcagctattggtagagctaagatggttgatgaaagttttgttaaagatggagcggtagttatagacgttggtataaatgttgatgaagaaggaaatttatgtggagatgttgatacaaatgcagttttagacaaagtatcaatgataactccagttccagcgggggttggttcagttacaacatctatacttgcaaaacatgtagttaaggcttgtaaattacaaaacaataaatagagatatatatgtggaaggtttaggggggaagtagatatgataatttctgaaaataaaccattagaagaagtgctagggtacttaaaggattttgacaagctggttttagttggttgtaatcaatgtgcagcaacttgtaaaagtggtggggaagaagaagttttaaaaatgaaggaaactcttgaaggtgaaggcaaaaaaatcttaggatatgtaatgcttgaccctgcttgtaaccttttaaagtctaaaaaggatttaaaggctctaaaagaagagactaaggaagctgatgcagttttatctttagcatgtggagatggtacacagacaatagttaagaatttaaaagataagccagtttatccagccaacaatactttgtttataggggaagtacaaagagttggagaatatgaagaagcctgtaaggcttgtggagactgtgaacttggttggacaggtgggatatgtccagtaactatgtgtgctaaaggtcttatgaatggggcttgtggtggagctaaaaatggtaagtgtgaagtaaactcagagaatgattgtgcttggataaagatatatgaaagactagaagctataggacaattagataacttagcagaaataagaccaccaaaagactattctaagcaaaataatccaagaagtttaagtgcaaagaaaaagaaagaagcagcagcaaattcataaaagttttttttagaaggttaaaagggggattagagatgagcttattaagagaaacattagaaagtggaaaatttgcagttactactgaaatggctcctccaaaagggactgacctttcacatttaatagaatgtgcaaagccgttagttggaagagttcatgcagcaaatgtaacagactttcaatcggcagttatgagagcaacttctcttgctacatgtaaattattaaaagatgctggattagagccagttattcaaataacagggagagatagaaatagaatagctatacaaggagaaatgttgtcagcaggtgtatttgggataaacaatttgttggcactaacaggagaccatactagcgtaggagaccatccacaggctaagggagtgtttgatttagattctgtggggatacttcaaactgctgagactttaatggcaggtacggacatggctggtaataagttaaaaggttctccagatttttatctgggagcatcagtaactccagaatattctccaatagaagttcaattattaaaaatgcaaaagaagataaaagcaggggctaaatttttccaaacacaagcactttatgacataaatacaatgagaaagtttagagaattaacaagggatatggattgcaaggtattagcaggaatagtacctttaaaatcaccaggaatggctaaatttatgactgcaaatgtaccaggaatattcgttccagatgaacaaatcgaaagattaagagcagctggaaaagaaaactgggtaagtgaaggaataaaaatggcaggggaacttatcaaacaattaaaagaagaagatttatgtgatggtgttcatataatggcaattggggcagaagagaatatacctgctatactggatgccgcaggtttatagtattgcaagattgtagattatattaggtttgggggaattaaggatgaagatagtagtagtaggtggtggaccaggaggatatgtagcagctataaaagcttctatgcttggtgcagatgtaacggttattgaaaaaagaagagttggaggaacttgcttaaatgcaggatgtataccaactaaagcacttcttgcttcttcaggagtattgaatactgtaaaagaagcaaaggattttggtatagaaatagatggtacagttaagccaaacttcactgccataatggaaagaaaaaataaagttgtaaaccaattaataagtggtatagagttcttatttgaaaaaagaggagtaaacttagttaatggttttggaaaattaattgataaaaacactatagaagtaactaaagatgatggaacagtagaaactataaaagcagataagataatactagcaaatggttctgttccagttgtaccaagaatgttcccatatgatggaaaagttgtaataactagtgatgaagttcttggacttgaagagatacctgagtctatgttaatagtaggtggtggagttataggatgtgagatagggcagttctttagagccttaggaacagaagtaactatagttgagatggttgaccaaatactattaaatgaagacaaagatgtagctaaacaactacttagacaatttaagaaagataaaattaaggttattacaggtattggagtacaaacttgtgaagtagttgatggtaaggcggttgcaactctttctaatggaaaggttatagaagcacaatatgcattagtatgtgttggtagaagacctaaccttgacaattctggagtagaagatataggaattgaaatggaaagaggaaaagtagtagttaatgaacatcttgaaactaatgtagaaggtatatacgcaataggcgatataatagatactcctttcctagcacatgttgcttctaaagaaggtatcgtagcagttgaaaatgctttaggtaagactaaggtagtagattatagagcaattccaagatgtgtttatactgaacctgaagttgctggtgttggtaagactgaaaagcaacttgaagctgaaggtgtagaatacaatgtaggtcaatttgattttagaggtcttggaaaagcacaagctataggacatttccaaggatttgtaaaagttatagctgacaaagaaactgataagataataggtgcagcagtagtaggacctcatgctacagatttattgacagagttgtcacttgctgttcatctaggattaacagtagaacaagtaggggatgcaatacatccacatccaagtttatctgaagggctaatggaagcacttcatgatgtacatggagaatgtgttcattctgtacctaaattataatagacagacagagtacataaggctctgtggctagatttaagggggaagtcttaaaatgggatacaatatagctgttgcaggaaaaggtggaactggtaaaacaagtctcacagggcttttaattgattatttggttaaggacaaaaagggaccagtattagttgtagatgctgatgccaatgctaacataaatgaagtgttaggtatcgaagttgaagcaacaataggagaaataagagaagaagtaaatcaaagagaaaagttaggcaatgcattccctggtggtatgacaaaggcacaatatcttcaatttagattaaattctataatcgaagaaggcgaaggatatgacttattagtaatgggtaggtcagaaggtgaaggatgttactgttttgtaaatgggatacttagagaacaagtaaacaaaatatctggtcattacaaatacttagtcatggacaacgaagctggtatggaacatctaagtagaaaagtcactagacatgttgatacacttttattggttagtgattgctcaagacgtagcatacaagctgttgctagaataagagatttagctgaggaactaaagttaagtgttggaagaatacttttgattgtaaataaagttccaaatggggttatgaatgatggtgttaaagaagaaattgaaaagcataacctagagctaatcggtgttgtacctatggatgaattgatatatgaatatgattctacaggtattcctttagttaatttacctgaagattcaaaatctaaagtggctatgaaagaaatttttgctaaattagaattaaaataggcttaagggggaaaaaaatatggcatttaaaatgtctactcaaaaatattctggaaaaatatcagaagttgaagtaggaataggggaaaaagcaattaaattaggtggggaaaatgtattacctttttatagttttgatggagaagtaggtaattctccaaaaataggtatacaaatatcagacgtttatcctgaaagctggactgattcatataaggaattatacaaagatgtagctaattgtccagtagagtgggctaaatatgttgaagctaatacacaagcagattttatttgtttaaaatttgatggttctgacccaaatggattagataagtcagttgatgaatgtgctgatgtagctaaggcagtaattgaagcaataaaattacctttagttgtagctggttcaggaaatcatgaaaaagatggtaaattatttgaaaaattagctcaaacattggatggacataactgcttatttatgtcagcagtagaagataactacaaaggagtaggagcatcagctggtatggcttatgcacataaagtaggagctgaatcttctgttgatataaacctagctaaacaattaaacgtattgttaactcaactaggcgttaaaggtgaaaatatagttatgaatgttggatgttcagcagttggttatggatatgagtacgttgcatctactatggatagaattagacttgcagcatttggtcaaaatgataagacattacaaatgcctatcataacaccagtagcttttgaagtaggtcatgttaaagaagctatagctccaatagaagatgagccagattggggttgtccagaagaaagaactatagcaatggaagtttcaactgcagcaagtgttttagtaggtggttcaaacgcagttatacttcgtcatccaaaatcaatagaaactataaaagaattggttaacgcattagcttaattaaattgttaaggttagggggaaaaaataatggcattaaaagctttagatatatttaaattaacaccaaagaaaaactgtaaggattgtggattcccaacttgtatggctttctctatgaaggttgcttcaggagctgtagaagtaggtaaatgcccacatatgtctgatgacgctatagcaaaattatcagaggctactgcacctttaatgaaagctttaaaagttggtgctggtgcatctgagtatgaactaggtggagaaacagtattatttagacatgaaaaaacattagtaagtagaaatagatatgcagtttcattctgtacttgtatgagtgatgaagcagtagatgctaaaatagctaacatgaaaaaagttgactatgtaagaattggtgaacaaatgaaagttgaaatggctgttttagagtattgtggagataaagatgcgtatttaaaattaatagataaaataaaaggcagtggattagaagtagcttatattttagcttgtgatgatgcacaagtagttaaagaagctgttgaagtattaaaagatgctagaccaatggtatatggagcaactaaagagaactacaaagatatgatagaagtagttaaaggagcaagtttaccattaggtgtaaaagctggtagcttagaagaattatatgaaacagttgaattaattcaagccgctggatataaagaattagtattagatgtaacaggagaaaacataaaagatacttacactaatgctatacaagttagaagaacagctttaaaagagcaagatagaacatttggatatccttcaatagtatttgcaaatagattatctaattcaaaccctatgatggaagttgctttatcatcaatattcactataaaatacggttctataatagtaatagatgatattagttatgctaaggcattaccattatttgcactaagacaaaacatatacactgacccacaaagaccaatgagagttgaaccaaagatttatccaatcaacaacccagatgaaaattctccagtattagttactgttgactttgcattaacttacttcatagttgctggtgatatagaaagatcaaaagttccagtatggttagtaataccagatgcaggtggatattcagttcttacatcttgggctgctggtaaatttggtggaaactcaatctctgctttcattaaagaaagtaaggtagaagaagtaactaattgtaaagaccttatcattccaggaaaagttgcagtacttaaaggtgatatagaagataacttaccaggatggaatgtagttataggaccagaggaatctatggaattacctaagttcttaaaaggataccaagaaaaagcatgccaaacaaactaataaaatattaactaactattaatattaaatttaaagggggacattataaatggaaaaatttatgattataggtgagagaatacattgtatatcaccttcaataagaaaagcattagcagaaagagacccagctccaatcttaaaaagagcaaaagagcaattagaagcaggagcacactatatagattttaatataggacctgccgaaagagatggcgaagaaataatgacatggggaatcaaattacttcaatctgagttcaacaatgttcctatagcattagatacagctaataaaaaagctatcgaagctggacttaaagtttatgatagaactaatgcaaaaccaataataaactctgctgatgctggctcaagatttgatttaatagatatagcagctgaatacgaagcaatggttataggtttatgtgcaaaagaaggtatcccaagagataatgatgagcgtatggcttactgccaagaaatattagaaaaaggcttaatgttaggaatggagccaactgatatactatttgacccattatgcttagttataaaaggtatgcaagaaaaacaagtagaagttttagaagctataaaaatgatgactgagatgggacttttaactacaggaggattatctaacgtatctaatggatgtcctaagcatgttagacctgttttagatagtgcattcttagcaatggcaatggctaatggatttagttcagctataatgaatccatgtgacccagaattaatgaaaactgtaaaatcttgtgacataatcaacggggcatctttatatgcagactctttcttagagttaaatgaaggtggatttgctttctagggtttttagggtatagttaataaaaaataggtgtaaatattaaagggggaaatagaatgaatctatataatataatctttacagggtcagaacaagctttaggtgcggctcaagctatgttagctgaagctatagaaaagaatggaaaagagcataaagttgctttccctgatacagcatattcattaccttgtatatatgctgcaacaggacaaaagatgaacactttaggggacttagaaggtgctttagaagtagtaaaatctttaataaatagaactcatttactagaacatgcttttaatgctggtttagctacggctttagctgcagaagtaattgaagcattaaaatattcaactatggatgctccatatagtgagccatgtgcaggtcatataactgaccctataatcagatcacttggtgtaccattagttacaggagatatacctggtgttgcagttgttcttggtgagtgtccagatgcagaatcagcagcaaaagttataaaagattaccaatctaaaggtttactaactttcttagttggtaaagttatagaccaagctatagaagctggagtaaaaatgggtcttgagctaagagttatacctctaggatatgatgtaacttctgttatacacgttgtatctgttgcagtaagagcagcattaatattcggtggattaactcctggtgatttaaacggattattagagtacacagctaatagagttcctgcatttgttaatgcatttggaccattaagtgaattagttgtatctgcaggtgctggagcaatagctttaggattcccagttataactgaccaaacagttcttgaagttccaatgaacctattaactcaaaaagattacgataagatagtagctacttcattagaagctagaggaataaaaataaaagttactgaaatacctatcccagtttcatttgcagcagcatttgaaggtgagagaattagaaagagcgatatgtttgctgagtttggtggaaacagaactgaagcttgggagcttgttgttaagaaagaagcaacagaagttgaagaccataagatagaaataataggaccaaatatagatgaagttgatgcagatggtgtattaagattaccgcttgctgtaatagttaaaatagctggtaaaaatatgcaagaagatttcgagccagttcttgaaagacgtttccactacttcttgaactatatagaaggtgtaatgcacgttggacaaagagatatggcttgggtaagaatctctaaagatgcatttgataaaggatttagacttgagcatataggagaagttttatatgctaagatgttagatgaatttgaatcagtagttgataagtgtgaaataactataattacagatgctgaaaaagtgtctgaattaaaaggagaagcaatagctaagtacaatgctagagatgaaagattagcttcattagttgatgaaagtgttgatactttctattcttgtaacttatgtcaatcatttgcaccagctcacgtttgtgttgttactcctgaaagacttggtctttgtggagcagttagctggttagatgctaaggctactaaagaattagacccaacaggtccttgtcaaccaatagaaaaaggcgagtgcttagatgatagaacaggtgtatggaattcagtaaatgaaactgtaaaccaaatatctcaaggtgcagttgaatctgttacattatattctatactagaagacccaatgacttcttgtggatgcttcgaatgtatctgtggtataatgccagaagcaaacggatttgttgtagttaacagagaatttgcaagtgttactccagttggtatgactttcggagaacttgcttctatgacaggtggaggagttcaaactccaggatttatgggacacggaagacatttcatatcttctaaaaaattcgcttatgcagaaggtggaccagaaagaatagtttggatgccaaaagaattaaaagattatgtagctgataaattaaatgctacagttaaagaaatgactggaatagaaaacttctgtgatatggtttgtgatgaaactatagctgacgattctgaaggagtattagctttcttagaagaaaaaggtcatccagcattagctatggaaagtgtaatgtaattgatggaaaatttaaaataatatgatataatattaatatgatttaagtaatttaatcaataatataatattgggggtctatcgaaatgaaattattaccagaattaaaatactctaaagatcatgagtgggtaaaagtaattgatggagatgttgtatatataggtataacagactatgctcaagatcaattaggagaaatattgtttgttgaaacaccagaagtagaagatactgtaactaagggagtagattttggagtagttgagtcttctaaagtagcttctgatttaatatctcctgttaatggtgaggtattggaagttaatgaaaaattagaagatgagccagaatgtataaatgaagacccatatgaaaactggatattaaaagtaaaactagctgatgtggctgaacttgatacgttattaagtgataaagaatacgaggctggattagaataattaaagattaagatattattataattggggaaagtatagtaaaatttgagtgcacgcaaatttagctatactttccttttatcatatatagaacaaattgggagggataacatgataaaagtgagttttacaccaaacaataaagaggtttattgtaatgagggtgatatattactagaggttgcaagaaatgcagatatattcatagatgctccttgtaatggaaacgtgtcttgtgggaagtgtaaagtaaaattattgaatggaaaagttgatacagaaaaaacaagacatataacagatgatgagtgggagcaaggttatatactagcttgttgtacaaaggtaatatcagatatagaaattgaagttccttctaaagtatcatcttctatgcatggtatgaagatagaaggtagtaataaaaaagaggatagggaaatttttgaaagagctaaaaaaataattgaagaacataaccttcaatttaaaacaaatataaaaaagaaatacatagaaatggaagaaccaaatttagatgataatataagtgatgtagatagattggaaagatatgttagaaatagcctaggatataatgaaatagattttagattggatatacttagaaaaatgccaactgtatttagaaagagtgattttaaggttacaataacatatgttcaaaaacaaaagaaacttacaatcataaatatagaacaaggtaataaagaaaattccttatacggagttgcaatagatattggtacaacttcagtagttgtttgtttagtagacctatattcaaaagaggtagtagataaagcatcttctggaaatgcacagataaaatatggagcagatgttataaatagaattatatattcaactaagaaaaatggattagagacacttcataaagctatagttgaggaaactataaatccactattaaaaacaatatatgaaagaaatggaatagataaggaagatgtagttacattagtggctgccgggaatacaactatgacaagtttattcttgggtgtgtatacagacttcttaagacaagaaccttacataccaccatttttaaaatctccaaaacttatgggtgaaaatgttggtctttttgtaaatgacagtgcatatgtgtacttagctccatctgttgcaagttatgtaggaggagatataacagcaggtgtattatcagcagggatatggtcaagtgaagaaaatgttttatttatagatttaggaactaatggagagattgtatttggaaataaagattatatgatgagctgtgcatgttcagcaggacctgcttttgaaggtggagggataagctgtggaatgagggcatcagcaggagcaatagagaaagtaattattgataaagaaactttagagccaacattaaagattattgatgaatgtgcaccagttggtatatgtggttctggtataattgatttaatctgtcaaatgattactaaaggtgtaatagatagaagaggtaaaatatacagggatttagataataagagagttagatttaatgagcatgagataggagagtatgtattagcatttaaagaagaatttgatttagaaaatgatatagtagtcaatgaagttgatatagataatttcatcagagctaaaggagctatatattcaggtgcatacactcttgtagatagtttaggtatggattttagtatattagatagggtttatatagcaggtggtataggaaacaacctagacatagaaaactcaataattatagggttacttcctgacattgatagagaaaaatttacttatatagggaatagttcacttgttggttcttacttagctctcataagtaaagatgcaaaaaataaacttgaagaaataggtaatcaaataacttatgttgaacttagtgtatatccaagttatatggatgaatttatttctgcatgtttcttaccacatacgaatatagagcagttcccaacagcaaagaaattactagaagagtaaaatgtacttaagaaggaataaactatgaataagaatctatctgaaaaaatgaaaatagcatttgatattaaattaaagaattttggaaataaaatagagtttgcttatcctaaccagacactagctcttagtactacaagcaatcaatgtagtttgaaatgtgcccattgcaacggtcactacttaaacaatatggtgccaatagaagaatatgaggaaaaagtacaatcaaggaatataactagctttctattgagtggcggttgtagttatgagggagatgtccctataaatactcatattaataccattaaaaacttaaaagagaaaggatatagattgaatgctcatttaggtcttatggataaagatagcattgtagagttgtgtaagtatttagatatagtttcttttgatttagtgtttgatgatgagacaataagagaagtttataagatgaaaaagagtaaagaagattatattgaagtttataatacaatacaagaacatacagaagtagcaccacatatatgtattggtttaaaaggaggacaaataaagggtgaatatgaaattatagaatacctacagaaaaatcctcctaataagcttacatttatagtccttattccaacaaaagggactgagtatgaaaatgtagaacctcctgagttagaaggggtagcagatattttatgtgaagctagaattaatttaccagatactgaaattaatctaggttgtatgagaccaagaggagtgtatagaaaagagctagaccaattatctataatgtgtggagtcaatagaatagtattaccatcaaggtctgcaaagaataaggctatagaaatgaatatgacaataaatgagtgtaaggagtgttgcgttttatgattagactatcagttgggacagcaatagagcttgggatattaaacaaaaaaagcgatatacctcctaccacagcatatataatgattggagaaaaatgtataaataaatgcagtttttgttctcaatcaatagaaagtagtactagaaaagataaattatcaagagtaatttggccagagttttcaaaagaagaaatattagatgctttaaaagcttataaaggaaaaaatataaagagaatatgtattcaatcaatggcaagtgaagaagcacataactctgttttagactttataaactatataagtggtaagatagacatgccaatttcactatctgcaaaattagaaaatgatgaacagataaagaagtttttttcagtaggagttgataaaataggaatagcaatagatgcatcaaataaagaactatatgaaaaaataaaaggaaataactatgatgaaaagttaaaatttataactgaaatgtcaaaatcatatcccaataaaataagtacacatataatagttggtatgggtgaaagtcatgaagatatatacaatttatatatttatttaaaggaaaatgatgtaacgattagtttatttgcatttactccagttagaggaactaaaatggaaaagataaatcaaccaagcatagaaagttatagaagggtacagttaatgtcttatatgataaataaaggttatccaaaagagtattttaagtttaaaaatggatacttaaatagtataaagcttgacaatgatattttaaaagacataaacaaaggctatccttttgaaataagaggttgtaaggattgtaatagaccatactataatgaaagacccggaagtactatatacaactattcaagacctttaaatcaaagtgagatagatttagcaataagagaaataaatctatagaggatttctaggatatatttatactaaaaatgggggcgtaataatcatgaatcagtggagagttatacataataaatcatatgaaggagcaatgaatatggcaattgacgaagctatatttactgcatataagaaaggacataataagccaactcttagattttatacatgggaaccagcttgtttgagtataggatattttcagaaattggaagatgagatagatttagataagtgtagatgtatgaatatagactatactagaagaattacaggtggaagagctgtattacatgataatgagctaacttatagtataattataggagaagataatcctttaatcgataagagcatcaacctatcttatagatatataagtgaaggtctagttaaaggattgaatctaagtggtatagaaacagataatttaaatagaggcgagagaataagtagggaaaatttatcagctgcatgttttaatgcacatgcatcatatgaagttactattaataataagaaggtaattggaagtgctcaaagcagaaaagatggtgttttattacaacatggttcaataatactggattttgatgtagaaaaattgtttaaattaataaaaactaagacaccagaattgaaagaaagagctatgaaatttacagctaaaaaagcaagtggaatagaaaatgaaattggcagaaaaatagacatagatattctacagaaaaacatagtaaagggattagctgaacaatttaatgttgagtttgtggagggcgatttgactgattatgagaagcaattagttaaagaactatatgaaaaatacaagaatgaagagtataataaaaagcgttaactttaattgactttacataaattaaagtgatatacttaaggtataataatatacaaaaactgaaatcatgaaggtttctttggagtattgaaatacctaagggaatctttttttgatttttaataaaaatcatattaggaggagatttatatgtgtgaatcatcagctttcatttgtaaaagtaataatgagttagaaaaggttatggaaaatgtggttaatatagacccttgtgatggaaagatttatttaacggatttattaggagagcaaaagataatagatgggataattaaagaaataagattgatggaccataagataataatacaagaaaattaattaataggggaatttcatatgataatagcagtgatagatggaatgggtggaggtattggagcccagatagtttcttctttgagagaagagttacctacatatgtagaaatttatgcactagggactaattctatagcaactagttctatgatgaaagctcatgctaataaaggagctacaggggaaaatgctatagtagtatcagctaaaaaagcaaatataatagttgcacctatttctgtaataatacctaattctatgatgggagaagttacttgtaatataagtgaagctattgcagacagtgaggcacttaagatacttttacctattatgccagaaaatgtggagttagttggattagaaggtaaaccattagcactacttgtaaaagattctgtaaaccttataaaaaaagagtttaatataaaataacagggggaataactaatgatttttgataaagagattgtaagatatcatcatggacatcatgaccatgaccactgccacgaacatactcatggagatatatgtcatgaacatccacatgaccatgctcacgaccacgaccatgaacatagtcatgaggaatcatcagagtctaaggatgaaaaaactttaaaaatacttttagtacattggataaatcacaatgaaactcatgaagaaggatttagagagtgggttgaaaaggctagagctattggaaaagaagaaacagcaaagagtattgaaaaggctatagagtatatggaagaagctaataaaatgttgttagaggctaaaaaacatatgtaaatataattaatcgcttatacgtttgatataagcgatttttatattttatgatgtttaattattaaaaattttatctaaggggttatctcaagatggatgtaagcctccctttcattgttgaaatgataaaaatatatctaatttcatgcaaaaaagagtatatcatgaactaaaaagtttattttgagatattttctgtaatatactttaatgagtaaattttattacaagattggattatttaatgttaaataattatatattctttaaatactgcaaaagcttcatcaaacaatttgagttatttgattaattatatattgagtattactatttaaagatagtattaatgttaagttaaaaaataatattaatgttaagttgaaaatagtactaaagataagatacttaaaaggcagtttaaaattactctaatattagatataataaaaattagcatgattaaaaatattattttgaagttaaaaaatttatgcatttatattagattttttctttaaaaaaggagtgaattatttatgaaagatggtcatatacattcaccttattgtcctcatggaagtaaggatgattttgaaaaatatgtacaaagagcaatggatgttggaataacagaaatgacatttacagaacattttccgtatgcaaatggatttagagaccctgctcctgaaaatgatagttgtatgagtattgaagatttaccaaagtattttaatgatgtcaagaagttgaaagaaaagtatgagggtaaaatcaagataaatgttgggtcggaagtggattttatagaaggatacgaagaagggataaaggagaatttaaataaatatggaaaggaattagaagactctcttttatcagtacatataattaaaattgatgatgattattattgtgtagattacagtgtagaggagtttcaaaatttaatcgacaaattaggaagtattgaagctgtttataataagtattatgaaacattgataaaagctgtaaattcagatttaggtatacataaaccaaaaagaataggtcatttaaatttagttagaaagtttaatcaggtatttccatacgattataaaggaaatacaattcttgaagacttaataaagttaattaaagaaaaaggttatgaacttgattataatgtttctggaaatagaaaagagtattgcaaagagccttatatagatggatacttattagagttggtaaaaaaatacgatattccattagttttaggttctgattctcactgtgcagaggaaataaataaatacgatattatttagatatattcacacaaaagactgtagataagtttgtataaaataaatttatgtacagtcttttgtaaatttatatgattgaaaatagtaatagaacttaaataaaataacaataagttctaagtaaaataacaatagaatctaagtaaaataataataaaattcaatagaataataggacttagaattaatctatcttatttatataaacattcttatataagattgtagataagattgtatttacacaaatctatagaccttctctattatattgacttagtaattataaatactattttgcgtttaaagttattatttcataagtttatcgttttccattattatagggtcaggcaattcaatttcaccttctgacatcttcaatctattaaacatataattttttacaccttttttatttttaaatttagtaacttgataaggtgatgtaacaccatatttttctaaaaatagaatgccatttttagttttaatacatatgcctgtatgacctataaatacgtttttagtttctggataacgaagaaatccatttataatagatatatttttattatttttaaaagatatttttctttttttccattcattttttatttgttctgcaattttgattgtatcatctgtatctttagctggtattgcagaaaagaagttgataaatttttctacatctttggtgctaaatttagcatctttattattcattatagtgtctaagtcgacattcaaatcaatagagtctccagtaaatttcttatttgaatttataaaatctttaaaaagtctaaaagcagttattctacaatttacatccatataatcagggaattttttcacccaattatcttgcaatttttctaggttatatggaacttgttttgcattgattgaagaatatccagatttagatatatttatattattttgaagtattttaacttgcaatttattataattgttgactgctttaataaatgtatctatgtctttttcattaattttattttcttttaggatttcctttacactattttgagtttttttatctatcatattagaatatatcaatttattattattatatttaatatttgaatatgcaaatatcgtaagtatacttgatagtactaagacaacagacaatatcattattattaatctttttttcatatttagttctcctttttaaatttattgtgtcgacatatttatagtatatagtacctttaaatttaccttcaatatgtttttaattacaaaactgttgtaaaaaatataactttatttaaaacttttttttaatatataaatatatatactaatagggggtacttatttttagaatattcagtaaaataattttgatatactctatatattttgtatgttaaaagtaaataaattattgttaaagaatgtaaagacttttaaattttttatcacaggattttaagtaaataagaaggattggagtaattaaaaatttttattttgcaaaaataagtatttatttatatggataaatttgattttaaatctatcaatatagataaaatcttattatttaacttcaactattccttaaaaaagcaacttttaaggaatagttgaaacaaaaagtttggttacataatagtaattttagttacaagaatgaaactgtaaaacttaggattttctttatataatttcattgagaacatttaatttaggaggtaaggtatgaaagtaaaaaaatttaaaagtggtatagtaatggcattaacagtaatggcaattggagcatcattgacaaatgtatcagctatggaattaaacaagagtaaagagtttgaaactaaatacaatgaaatgaagagggattttcaagaggattatggaaaagaagacaaatttaatataacattggatgatgaatttacaaaagaagaagtaaatggagctaaagggattataaagacaactaataaaatgaataatgaggttgtagtattaaattattttgatgaaatgaaatctgggattgaatttgagttgaaggcaaaagcagaaaaaaatgcaattttgagagatgaatttcaacaaggttatggaaaggaagataaattcaaagttgtgttagatgatgaatttacaaaagaagaggtaaatggagctaagggcattataaagactacagataaagagacaggtgaggttatcgtatataattactttgatgagcttgaaaaataatgcttaaagattactttgattgaatgaaaaggtaattgtgttgagaatattaaatgactgaataaaaacagttgtatcaaaaacaaacaataatagaatgtaagaatgattgtgtcgaaaatattaaatgactgaataaaaaatagttgcgtcaaaaacaaacaataatagaatgtaagaatgattgtatcaagaatataaaatgattcaacaaaaaacgattgtgttaaaaacaaacaacaatagaatgtaagaatgattgtatcaagaatataaaatgactgaataaaaacgattgcgtcaaaaataaacaataatagaatgtaagaatgattgtatcaagaatataaaatgatttaacaaaaaacgattgtgttaaaaacaaacaataatagaatgtaagaatgattgtatcaagaatataaaatgatttaacaaaaaacgattgtgttaaaaacaaacaataatagaatgtaagaatgattgtatcaagaatataaaatgatttaacaaaaaacgattgtgttaaaaacaaacaataatagaatgtaagaatgattgtatcaagaatataaaatgactgaataaaaaacgattgcgtcaaaaataaaaaacaattaaatgtaagaataattatgtcaaaaatataaaataaattaaaagaaaaagattatactgaaggaaaaagatttgaaataggggtgaactttacatattatagttcacccttatacaaaaatataaaatataatttattataggaaaatttaaaaaaatcagtctatttaatttatactgatgtattgtaggattttacaaacaaactgttatataactttttttatctccaattttgattttaagatatctaagaatttataacaatcttctggatatatttctcccatatttgcaacttggaatatgttagcatctaggaatttgccttttcctggatagacaacatagccactttccctttctaggcctaatataaactcatttacattgatttctttaggtagaaatacagatgttactgtattagacatatacttatctggaagtaaaaatgttagccccaattcttccatgccattccttaaaatagcagaacattctttgtatctttctattttactgtcatcttccaaaaactcagttaaagcttcattaagggcaaatattaaagtaacattaggtgtatttggtgtttgagaagatgatttagcaactttatagtgtttataaagattaagatatacattcttacattgattttctttaatattttgtaaaatactctctttagcacaaaggtatgcagaacctggaaatgctccaagagctttaccaccaacacctgttattatatctatattaaactcttctacatcaatatattcacctgctgaggcacttattgcatctacaaaaaatattttgttatacttcttagcaagttttcctagttcagggactggatttatcattcctgaactagtttcatggaacaccatagcaattacttttatatcagaattttcaattatatatttttctaaaatgtccaggtctgggtattctgcccattcaaaattaggcttatatgtttttacattataagtaaataatatttcttctagcctttctccaaaaacaccattactaactagcagaactgcatcttctttgtcaaagatagaagatagtacacattcatttacagatgttccagagccagatacaattaatgagtagtaattagaagttgcattatatagtttattgattttttgttgtgtatctttgaataaatccataaactcgtttcctctatggcatatatcatagtgaagaagtgaatttctgactttatctgtaaccattactggtccaggactgaatagatatgtttttttcattgtaaagcctccttaaaaagttaaatttaaattttcgaatgactgactatgtgtaaatattaaaatattgtgtgttattttaactagattatagaataaaataatgaatattgcaataatatttcaataaaaatacttttttaatcaccataattaaaaataacaaaaaatattgtaatgaatattgcataaatccacatgatgatataaaatataaataacttgaatagattatatattcaaaaaataaaaaagaatttattaattctgaaaataaagggggacattttaagtgaaatatgtattagcaattgaccaaggaacaacaggaacaagagcagtattgataaacgaaaaatcagagtttgtttttagcgattatatggaacatactcaaatatatccacaatctggatatgttgaacatgaccctatagaaatttggaataatacaaaaactgtgagtaataatgtattacaacaggcttttgaaagtggaatcaatgaaagtgatataaaaggaattggtatagataatcaaggtgaaacagtaatgttatgggataaaaatacaggtaaaccactttacaatgctatcgtatggcagtgtaggagaacttatgattatgtggaaaatttaaagaatataccaggtttagaaaataagataatagataagactgggttaattatagacccatatttctcaggtacaaaaattaaatgggtaatagataatgtaaaaggtgtaaaagaaaaaattaaaaatggagaagtacttgcaggaacattggatagttggttaatatggaaaatgacaggaggaaaatcttttttaactgatgtatctacagcagcaagaacaatgctttttaatataagagatatggattgggatagagagttgcttgacattataggagtgcctagaagtattttagcagatataatgcctactagtggtgattttggaactacagataaggaggcattttgtggggtttctataaaaattactgcttcaatggtagaccaaccagcagctttatttggcaatggatgttttgaaccaggaatggttaaaaatacttatggtacaggatgtttcttatatatgaatataggtgaggagttaaatatagcaggtaatggtattttgacaacagttgcttggaagataggagataaagttacatatgcttatgatggtggagtgtatatagcaggtgctgcaatacaatggcttagagatggaattggagttataaaaaattattcagaaactgatgacatggcaaattccatatcaagtactggaggggtatattttgtaccagcatttgcaggtatagcagcaccttattgggaccaatatgctagaggcacaatggttgggataacaggaagtactaaaaaagaacatatagtaagggctactcttgagtctgttgcacttcaagtcaaggatgttgttgattccatgaatttggcttcagggaaagaaataaaaatgttgagagtagatggtggaattactaaaaataactttacaatgcaatttcaatctgacatattagatataccaattgaaattgcagaaaatcctgaaacgacagtacttggtgtagggtatatggcagggctttcctgtggtgtttggaacagtattgatgaaattagaagtgaatttacaataagcaaaaaatatattccaaatatgactaagcaaaaaagagaagaaatattacttggatggaatcaagcagtaaaaagagctatgaattgggaaaacgataccaaaaaggtgtgtgctaattaagttacaatagagtattttacatgtataggaggaattaaaaatgccctttgataaaattatattatacataatggctgtgggagtgcttttaggagcgttagatagaataattggaaataaatttggacttggagagcagtttgaagaagggtttaattcaatgggtccattggctttaggaatggttggtatagtttgtttagctccagtaatttcagatgtactaggtcctataataataccaatattcaatctctgtggagctgacccatctatgtttgcaactattttagcgaatgatatgggagggtatccattggctatggaacttgcacacaataaagaggcaggaatgcttgcaggattagtcgtgtcatccatgcttggatgtacattagtattttcaattccagtaggactaggtcttatagaatatgaagacagaccattctttgcaaaagggttactgataggcttgataacaataccttttggaggtattataggaggattaatagcaggatttaacttatcaatggtaattataaatatgataccagtgataatattggcagtaatattggcagtaggtttaaaatttaattctacacttatgataaatgggtcattagtttttggaaaatttatatctatattgataacgataggtttgggagcagcagcatttcaagaaataacaggtatagtacttataaaaggcatgacacctataagagaaggtattcaagtaattggaagtattgcaatagtgttattaggtacttttccaatattacatttattagttaaagttcttaataaaccacttacaatagtgggtggaaaattaggtatggatgccactagtgcagcaggattagtttttactttagccaatagtattccagtatataaaatgatgaaagatatgagtccaaaggggaaagtagtaaatactgcttggctggtttgtgctacagcagctttgggggaccatttaggatttacagcaggagtagttccagagatgattacacctgttgtaattggaaaattggttggaggagtattggcaattgcacttgctatacttatgacaaaagatttaactttggaagaagaacaaagtattaaaatgaagaaagatgcagtgtagaataaacaatacttaagtcaaatttaagttattttaaagtaggagtttaaataactaaaaataaattaaaaagacagacaattaaaaaataatcgaataaccaaaactgataaattaaataaaatggcaatcaaataactaaaaatgataagctaactgaaagtagttacataattaaaatataaagtatagtttagacataagtggagctaaataaataattatttggctccttaattttaatttattacatcaaggaactaaaaatcaatcatacaagctaattatcagctatgactaaaggtattcctttttgagaaaactctattattatattatggtctatactagcagaggtaataatagtatctatgtgttctataggagctactgatgcaaatgaatttataccaaacttaggaggttcgacaactactatagattttctagacctttcaatcattttttttctaaccagtgcttcttctaagtgatagtcagagattccattttcaagagtgatacctccagcacctaaaatagctttatcaacattaaattgttcaatagctgagagtgtaagtggaccagaaaaagaaccttcagtttctctaagatagccaccaagcacatatacttttatattagtattcataagttcatttgcaactaaaattgagttggttattacagttagattctttttatctttcaaattttttgaaacttcaagtacagtagttccagtatccataaaaatagtatcatttgtatttataaactcactacatttaatagcaatctgttttttatcgtttgagtttattttttttcttttaacatagttaagttctacgctacttgctataactggtatagcaccaccataaactctttttaaaagaccgatactttccatatgggctaaatctcttcgtgcagtttctattgatatatcaaacatttgaactatgtcatttattttaattatattatctgatttgagaatacttaaaatcttctcgtatctttcctgtggtaacataaaatatcctccttggactagtattattttagttttggcataacttacaattaagtcagagtttaggtatatttgttaatgtatgtatatttatcaaataatattataagtgttatgcaagataattttaccatatttaaaacttacatttaagcaaaaaagtaaaaatagatgtttaataattcaaaataactcaaattttataaaacaattgactaaaatatgattttattatataatttactagtatagagatatggagaagtactcaagtggctcaagaggatcccctgctaagggattaggctgggtaaccggtgcgagggttcgaatccctccttctccgccaattgttaaaggctatttttattaaagatagtctttttataatgtcataaatgattagatatgtataattaaagaaaggagggaatagatgacaactttaatttttttcatagtggggatagcatctttggtagttgcttttgttattgatgggggacatattggagtattatttgtattttcatcagcacttgttgtgtttggtggaactataggcgctgttggagcttcgactccattccctgtgtttaaaaagtctataaagataatgttattagcttttaaaaataaaaagcctaataacatagaaaatataatctatttcaaagaaattgcaacaaaggctaggaaagaggggcttcttagtgttgacaaagaaataagtgagaatgatgaattagacccttttattagaaaagggcttgaacttatggtagatggggtggatgcagttactataagaaatatattggaatcacagatacagataacatcaaaacgacataaagaaggaatagcaatttttgattcagcaggtggatatgcacctacactggggataataggtacagttatgggattagtacatattttaggtaatctttcaagtaatccagatgcattaggacctcaaatttctgttgcatttttggctactttgtatggtgttggttctgccaatttaatatggttaccaatagcatcaaaacttaaggctataaatcaacaggaaataagtgaaagacttttggtgatagaagcaatattatccatacttgagggtgataattctaatttaatgacagaaaaattaaaaatatttttaaattcaaaagaactaattgaacttgaagaaattggtggtagagctgaataatataaaaggatggaatgtttatgttgtatgatgaagatgaaaaagaagaaaacaatgagcgatggcttttaacttattcagacctcataacattacttatgattttctttgtaataatgtattctatgagtaatgttgatgcggagaaatataaacaattatctcaatctctaaattctgcttttggtggttcttctggagttattgaaggtggtaatagcaaaatagaaccagtagttgaaccaggaagtaatgatttagatagtttacaaaatgctaagtttaaaaaagttggtgaagaaatccagaagtatttaaatgaaaatggtatggctaattcagtatcattaagagttcaagatagaggattagtaataagccttaaagatacaatactatttgatacaggaaaagcagttgtaaaggataattctagagataagattattcaaataggtaagatgttaaatgaaatgaatagttacatgagagtagaaggtcatacagacaatatgtctataaaaaattcagagtttaagtcaaattgggatttatcagttatgagagcaaccaatgttgttcaacttcttattgacaatgcaggtatagcaccagataaattatctgctgtaggatatggtgagtttagaccaatagcagaaaattcatctgaagaaggtaggtcaaaaaatagaagagttgatatagttttagttgatagtaaatatgataatgtagaaaatgtttcaaaggataaatagttaaattagctgtctcaatacagaattaattctaaaggagatggcttttttatgcgaaaattaaaaatagatacatagtaagttacctttttgtaggaatatatggtatcttaaatatataatatttaaataatatataagctcaattaaaaaaattttatagaggatgggaaataaatggggaataaaaataaaaatacgaaatataaagataaaacaagagaaagatataataaaaaagttgagaatttaaataaagaaaaattaaataaagataataaacagtctaagaaggtagataagattgatgatattattaataaatctagtattgtattatgtgtacttctagtggtgttttcattactttacttatttaaattggttcaacttaatataataatgatacttttagtaattacagtagctattcaacaaggattggtgtcatttggtgcatttagaaataaaaattatgtaaaagctttattttctatatttgtaatagtatgtttcttaattgcttttaaatatgttgtaaatcctgtttaaatatatcaataaacgttctataattaatataaatagtgaagttacagttttaatgctattataaattttataatttgaaggagtagattttatgaataggtgtaagtttgcaaaattaattatcacatcaatgattgttttattacttacaggatgtagtttaaaaaaggaagataattataagttagacccagaaaatccgacatcaatacaaatttggcattattataatggacagcaaaaaatggcttttgataagcttgttaaggaatttaatgacactataggtgctgaaaaaggaattattgttgaagcgtttagtcaaggtaatgtagttgatttatcagagaaagttttagattctgcaaataaaaaagttggctctgaagatgtgccaaatatatttgcagcatactcagatactgcatatgaaatggataaattagggttactagtagatatggataagtacataagtaaagaagaattaaatgaatacatagacgaatatgtagaagaaggcagaataaattctaaggatgagtttaaacttttcccaattgcaaaatcaactgaaattttgatgttaaataaaactgattgggataaatttgcaaaagctacaaattcaaatataaatgatataaaaacaattgaaggattagtagagacatcaaaaaaatattatgaatggacagatagtttaacgaaagagcctaatgatggtaaagcattttttgggagagatgctttagcaaattatattattataggaagtaaacaactaggagtagaaattttttctgttaaagatggtaaagttacactaaatattgaagaaaaagttatgaaaaagctatgggataatttctatgtaccatatataaatggatattttgcttcttatggtaagtttcgttctgatgatgcaaaaacaggtgatatattagctcttgtaggctctagttcaggagcagcatactttccagatagagtaatgctaaatgataatgagagttataatattgaaacatctgtttttcaagcaccacgttttaaaggagaaggaaaatatgctgtacaacaaggtgcaggaatggctgtaacaaaatctactaaagaagaagaatatgcatcagtagaatttttaaaatggtttacagataaagagcctaatataaaattctctattgcttctggatatttaccagtaaagaaaaaaacgaatgatttgaatgttataaaagaagttatgaagaaagataatttgagtttatctgataaagttgaaggttcaatagcctcatctattgaacaaattaacagttgtaatttatacactaataaagcatttgatggtggaactaaagctagacaaatacttgaatattcaatgcttgataaagctaaagaagattcaaataaaataaatgaattggtaaaaagtggaacttctaagaaggatgcggtagcacaatttaataatgataagaattttgaaacttggtttgaaagttttaaggctgagcttgaaaatgctataaaaaaatagatgaattggcagttagtgtgtagacaagcacaaaggtataggtggaataagtatggaaaacaatctaagaaaaaacaattcaataatgaaaaagatgatatttcccctaattattgttatgctaattcaaacaagtttattttgtgccacaattttatggggaggaactattaagaaattaaatgataattcgtttgacatcttaaatgaaagagtaattaatcgtaaaaattatatacaaaatgaaatgttacaaagatggtcaaatacaagtgaaacggaagctacaattaattcctctgtaaaaaaaatattaaatgaaaaaaatgccttaattgaggatgtaggcaacaatgaagaaattaacaaagatattataaaaagcatatcaaatgatttaatatatcttttgagaaaaaactctgttacaggagcttttataattctaaatgacaaaaatattaacgataagccaatagatagtaaaggtgaaataagtaggactggattgtatataagggatttagaccctaagtttaatccaaatgataattctgatttgttaattgagagaggttcatcagatatagcaagaagttttggaatatctatggacagttattgggaacctaaattttcatttaaaagtgaaaatgagcaagagggagatgattttttttataaaccatttagagctgcaattgataatccaaacgtatcaagttctaatttgggatactggggaagtaagtttttattgacaaatgcaggtgataggcttatgacatatacagttccccttatttatgaagatggaactgtatatggagtacttggaatagatttaagtgtaaattatttaagagaattacttccatactcagagataaatggaaataaaaaaggtaattatattttaggtgtagatagaaataatgatatggcctttgaaaatgtaatttcaaatggatactcattaaaagaaaaattttgggatggtttacattctaatttagagcagaaggaatcgtataaaaatatatataagattaaaaataaagataatgaatgtggtaatggcaacatttatgctagtgtacaatacttagatttatataactccaatactccatttgaaaatgaacgttgggctcttttgggtattattgaagaaaaaagtcttttgtcattttcaaaaaggatagagaaattagttataatatctatagcaatttctttattaataggtctaataggtatttacattgcatcaagattatttacaaaaccaattgttcttttagccaacaaagttagaaacagtaatccatcaaaaccagtaaatcttgataagataaatatatctgaaatagatgaattatcttcagctatagagttactcagtgcaaatgttgcagattcttcatcaaaattatcacagattattgaaatggtagatatgccaatcggggcttttgagttatacaaaaacgcagagaatgttttttgtacaaaagataaaaaacttaagtggataagaatgaatatctttgaagatgagctaaaggttcttggtgttgttgttgatgtcacaaaagaatttattgagaaaaggaagatagaatatgaaagagattttgatattttaacgaatcttttaaataggagagcttttcattcacagatacaagaaaaatttaagaataaagatgaacttaagatagcagcatttattatgtgggatttagataatctaaaatatattaatgatacatatggacatgatgctggtgatgaatatattaggtgtgctgcagacatacttaagaagtttatatcatggaatggtatagtatctagactttcaggtgatgagttttatgtatttatatatggatatgaaagtaaagatagtataagagatattattaattctgttaagaaacagatgaataataccttattaaaacttcatgatggaacagaatttaaaataagggcatcagcaggaatttcctggtaccctgatgattcaaccaactatgatgaattaatgagatacgcagattttgctatgtatcaaattaaaaatacaatcaagggggaagttagtgaatttgatattaatatatataataaggattcattcttattgagtaatagagaagaattaaacaagttaattgatggtcaattagttgagtatgcatttcagcctattgtagattgtaaaggtaaagtatttgcatatgaggcacttatgagacctaaaataaaaacttttagttcaccaatagatgtaattagattagctcgttcacagtctaaattatatcaaattgagcgtattacatggtttaaagcacttaaatcatttaaaaaatacaaagaaaaatttggcgattgcaaactgttcttaaattctattcctaataataatttatcaaaagtagattttgaggaaattgaagatttatatggtgaatatttaaatagagtagtattagaaataacagagaatgataagattaatgaagattttattgagaaaaagaaagcatatatagaccattggaatatagaaattgctttagatgactttgggacaggttacaacggagatgctgtactattatatataatgccagactatgtaaagattgatatgtctattgtaagaggtattgataaagatgaaaacagacagaaaatattaaaaaatcttatctcatattctaacgaaagaaatattaaagtgatatcagaaggtgtagaaacaaaaggtgaaatggaaacactgattaatcttggagtagattatatgcagggttactatattagtaaaccatcatttatacctgaagatataagtgacaaaattaaaaaagagctcaagatatgtcatgaaaataggaatgatgtggtttaatagaggaaaaattaaatttatttttatgaacttttagtttataattaaaaagaaaataatataattataaattaaggtggtggagctaataatcacaacaaacatagatataagaaagttaaatgaaaatcaattagaagcagttgaacatatagatgggccttgcatgatacttgcagggcctggttcaggtaagaccagagtaattacatatagaatagccaatatggttgtaaacaaaaatatagcaccaacaagaatcttggcaataagttttaccaaggcatcttcaatagaaatgaaaaatagagctttgaatttaagtgatgatataagacttaataaggtaacctatggtacttttcactctgtattttttaaaattctaagatactttgaaagatacaatttagacagtatatttgatgaaaagtcaaagcgaatgacaatcaaggcaatcctaaaaagtttaaatatagagaatgctgatgatgatgagaatataggacaagttataaatgaaatctcctatgtaaaaaatgaacttatggataaaaatgaatttaattcagaagtattaacaaaagatgagtttttaaaagtatacaacttatacgaagaacaaaaatctaaagttaacaaaatagattttgatgatatgcttataagaacttattatttacttttgaacaataagtctgcactagaaatggttagaaatgtgtataaatatatattgatagatgaatttcaagatataaataaagtacagtttgaagttttaaagttaatttgtagcccattaaacaatatatttgcagttggagatgaagaccaaagtatatatggatttagaggtgctagaccagattttttgcttgaatttgaacaatactttaataatactaaaaaaataatattagatataaattataggtctaaaagtgagatagtgtatactgcaaatagacttatcgacaaaaataaaaatagatatgaaaaagtcattaagtgtagtcagggggatggaggaagtgttacctacatttctccacatgattcagaggaagaagccttatatattgccaaggaaataattgacgaaatacaaaaagattatgtagagtattcagattttgcagtaatttatagaacaaatatacagtcaagagcattagtagatgtatttatggatatgaggattccatttgtagtaaaagactcagtaattacaatatatgaccattgggcaagtcaagatatactagcttatttaagaataggtattaatccaaaatcaaataaagattggttgagaattataaacaagccttttagatatatatccaaagacagtataaatatggttaaggatgaaaaagactttataacagcattaataaataagtgtaatcttcatcctaaacaagttaaaacaataaatgatttggaaatagatttaagttatttaaatactttaaatcctaaaaatgcaatatcttatattagaactagtcttgattatgatagatacgttttagattattgtagcaacagaaagataaaaactaatggacttgtagagatattaaatgaacttgagagttcagcaactaattttaatactgttacagagtttttagagcatattgatagagtaaagactgagttaacggaaaataacaagaataagcagactgagggtgtcatatttacaactatgcatagtgcaaaaggattagaatttagaaatgtttatattataggtgtaaatgaaggaacaatacctcatgaaaaatcatatgatatttgtaaggaagagaaaaaagaagaacaattagaagaagaaagaagacttatgtatgttgctattacaagagctgaagaaaagttatgtataagctctactttaaataagtatggtaagaaagttgataaatcattatttattaatgatataaaatctccaacgaaaaaagaaattgacagtattggtgtaggggataaggtataccataaaaaatttcatgaaggagaaataattaaaaaagatggaattatgtttacaataaagtttaaagatagagagcgaatcttggatttgaaaacttgtttattgaagaatataatttatactatttaatttagaatctaaatttagatagaaatataatgtattatttattatgtgcaagacaaatagatatgtgtaaaatgtattatttaacttattagaaaaagaaataaggatttaatatattatttatagttgtttagaaaaagcaacaatgtggaaaatattatttagtattattaaagaaaagcaacaatgtgaaagatattatttagtgtaatttaagaaaaagcaacaatgtgaaagatattatttagtattattaaagaaagagcaacagtgtgaaagatactatttagtattattaaagaaaaagcaacagtgtgaaagatattatttagtgtaatttaagaaaagcaacaatgtgaaagatattatttagtattgtttaagaaaaagcaacaatgtgaaagatattatttagtattatttaagaaatagctaaaaatatgaaatatactatttataattacaaaaataatatcaataaatataaacagtagtatttagataatttacaagtaaaaattattaaaaaaataaaaaacttattgacaaaaatattataaggaagtacaattgtattaacaatttaaggaaacaaatccaatgatagagaaagtagcatatatggatttacagcgagttaggggttggtgtaagcctagcaatgaagtctatgtgaagagagctctggaggagattatcagaaactttagtatgataattggtttacccgccttaagggattgagaggataagtacttacttatcaaaaagagtggtaacgcggatataattcgtctcttagctgtaaagctaagggacttttttgatttaaaaataaaaatatccatacagcttaaatgctaacagtcacaaattttgaaagtaatataagtatttatcaataagagtggtaacgcggtaaagtcgtctcttagtcattaaagactgagagactttttttgtaactcgaaacatttaagtattaaaatctgagggaaattataattaaaagagaggggtagttaaaatgaaagtatttaaaaaattattaagtttaggattagtattaggattgacattatcgctagtaggatgtagtggtggaggagaaaaaacaaagttagaacaaataaaagacaatggaaaattagttgttggtactagtgcagaatttcctccatttgaatttcataaggtagtagatggaaaagattcaataaaaggattcgatataatgttggctgaagaatttgcaaaagagcttggtgtaaaggttgaaattaaggatatgtcatttgatggattaataggtgctttaaatgcagaccaagttgatattgttcttgcaggtatgtctccaacaccagagagagaaaagagtgttgatttttcagaattatattatttaagtagaaatgcagttatagttaaagatgcagatatagacaaagtaaaaactgaagatgatttaaagaaacttagagttggagttcaagcaggaagtatccaagaagaatatgtagttaacactttaaaaatgacaactacaaaatctttaaaagcaatacctgatttaattacagaattaaaaaatggaaacatagatgcagttgttactaatgaagcagtttctttaataaatgttaaaaaatatgatggaataaaaatggcaaatactgaagttggtaaagatgtaacagaaggtatggcagcagcaatcaaaaaatctgacaataacaaagattttatagaattattaaacaaaaagataaaagaattacaagatggtaagaagatagaagaatttttaaatgaagcatctactgaagctgcttcaaattagtaagaaagttatgtgggagatgaaattatgagtttagattttagttttttaagtagatttgggacttcttttttggaaggaacaggtgtgacagtatcaatttctcttgtggcattatgctttggatttataataggtataattatctgtatggcaaaaatatcaaagagcaaagtattaagagcaatatcatcaatctatattgaggttttaagagggacaccattattagtacagatatatatagtatggtttggtttacctcaattaggaataagattccctatgttgtttggtataccaagtgaatttatagctagtgcatttgcattatcagtaaactctggtgcatacgtggcagagatacttagatcaggtatacaatcagttgataatggacaaatggaagcaagtagatcattaggattaaattattggtcaactatgagatatataataatacctcaagctataaaaaatatattaccttcattagcaaatgagtttattacacttgtaaaagaatcttcaataatatctgtaataggagttgttgagataatgcgtactgctgatatagtaaaaaatgcagcatttagagcattagagccattaatagtagcagcagcaatttactttgttataacatttactctatcaagattagttggattattagaaaagaaactatctgtgtctaactagatgagagcatgtttagcatttagggaaaacatagaatagtaaaaaggaaagtgataatatgattacaataaaaaatttaagtaaatcttttggagatttaaatgtattaaaaaatatagacttagaaatcgctaaaggcgaaataatggttatagtaggtccaagtggttctggtaaaagtacacttcttagatgtatgaatttactagaaatacctacaggtggagaaataatatttgaaggaaaaaatttggtcgataaaaaaactaatattgatgaggttagacaaaatataggtatggtgtttcaaaactttaatttattcccacataagactattttagataatataacattagcaccaattaaattaaaaaagatgactaaggaagaagcagaaaaaaaagcagaaattttgttgagtagagttggtcttttagataaaaaagattcatatccatcacaattatctggaggacaaaagcaaagaatagcaatagctagagcacttgctatggaaccagatatgatgttgtttgatgagccaacatctgctcttgacccagaaatggtaaacgaagttttggatgttataaaagaacttgctaaagaaggtatgacaatggcaattgtaactcatgagatgggatttgctaaggaagttgcagatagagttatttttatagatggaggaagtatacttgaagataatactccagaagaagttttcggaaatccaaaacatgaaagaacaaaagcatttttagcaaaagtgctataatatataaaaaggatgttattgatattagaaattcaatacatccttttttagtgatggttaatattaattttaaaattaaagttatattaatattaactttatttttacgattttttgcagaaaaaaaaagagctcggggtaagctctttttttccaccgaattaatttccgttactaatccgatttttaataaatataaaatatatccttatgaaagggtattgggaatagatatattaactaactagggttaccagggggataaccttaatttattataacaaaatgcgacacaaaaatcaatattttttttgaaataaattataaaagttatttttataacaagtaagcttataaatttaacttttatagtaaaaataagtatatgtataatataatatatttattttatataatatattattttatcatatattgtattttataatatatttttgtaaggtatagtataagtatattatattttactataaaaatttgtaataaagtgaaaaaactagcttttcatgaaataatattttataatttaagattgtctttttaataaagattaacaaaaaaaatactataattagtggtataatagttagagttgaagattttaaataaaggtaggtgtaattaagttggaaatatacttagacaatagcgcaactacaaaaccttatcaagaagttatagataaaatggtttatgcacttaatacggaatatggaaatccttcttctgtccatagaaaaggtgtagaagttgaaaaagctataaaagaagtaagacaagatatagctaaatctctaggagcgaaagaaaaggagatttattttacatcaggtggtacagagtgtaataatactataataagaggtattactagtttaaataaaaaaagaaaaaatcacataatatctactaacatagaacatccttctgttttaaatacattaaaagatttagaagaagatggttttgaagtaacttatttagaggtcggaaaagatgggaaaataaatatagaggatttaaaaaatgcgataaagtcaactacatgcttagtaagcatgatgcatgttaacaatgaaataggaactatacagccaataggtgaagttggaaagtatttgaagggtttaaaagaaaaaatttatttccatgttgatgctattcagtcatatggaaaaattaattttagaccatctaaatacaatatagattttatgagtgtaagtgcacataaatttcatggtccaaagggaattggatttatgtatataaaagaaaataatcgccttaagcctatgttaacaggtggtggtcaggaaattggaattaggtcgggaacagaaaatgtacctggaatatatggtcttggagaagctgttagaatactaaacaaagatttagatgttgttatttcgaaagtaaataacttaaaaaatatattaaaaaatgaaataattgataatatagaagatataaaaatcaattctccagaagatggagtatgtcatatattaaatgtatcatttagagggacaaaaggagaagttttacttcattacctagagcaaaaaggtatttatgtatcaactggctctgcatgttcttctaaaaagaaaggtagttacgtattaaatgctataggtcttacaaatgaagaaataaatggaacaataagatttagtttatctgatatgaatacagaagaagaaatgttagaagctgtgaaagttttgaaagaatcaatttgtgacttaaggtcaataatgaaaagaaaataaagaatactgtatagatagtgataataaattagtttaagaggtgaaatggtgtataatatattaatagtaaagtatggagaaattggagtaaaaggaaagaatagatatatatttgagaataggcttataagaaatataagaaatatgttaaaaccaattggaagatttaatgtatataaagagtatggaagaatatatgttgatttagaagactatgattatgaagaagtaattgaagaagttagaaaagtatttgggatagtgggtgtgtgccctggagtaagagctaaaaaagattatgatacattaaaagaaatagctttaaaaatgttagaagaaaaaatagaggctggatataaaacttttaaggtagagtcaagaagaggagataagtctttcgggttgacttctcaagaaatgagtatggatataggtggatacttattatcaaaggtaggagataggattaatgttgatgtaagaaatccagaagttaaaataaagtgcgaatacagagaatttcatactatggtctatagtgatactatacctggatatggtggattgccacttggaacgaatggtagagctatgtctcttttatcaggaggtatagatagtccagtagctacatggatggttgcaaaaagaggtatggaggtagaggcagttcacttccatagttatccatttacaagtgaaaggtcacaggaaaaagttaaggatttagctaaaatactggcaaaatactgtggtagagtaagacttcataaagttaacatattagaaatacaaaaagcaattggtgagaattgtaatgaagaagaagctactattctttcaagaagatttatgatgaggatagcacagagactttctgaaaaaagacattgtgatgctttaattacaggtgaaagtattgggcaggttgcatctcaaactatacaagggcttacttgtactaatgccgttgtagacttaccagtgtttagaccacttatagcaatggataaatcagatatagttgatatagccaaaaaaatagggacttttgaaacatctatagtgcctgaagaagattgttgtagtgtattttctcctagaaagcctgtcactaaacctagattagagaaaatagaaaaatctgaaacagcacttgatattgaaaaattagtacaggatgctattgacaaaatagaggtagaggatattgagttttagcatacaagttatttaattactaaattgaatattgagtatattagtagttctgtaagtatattagtagttctgttgaaaggatttatgtagacaatttattaatatatagtatttaaaaataagtactataattttatttaatgggaatgattattatgaataaaaagggttttacattaattgaattgttggtagttatatctataataggaattttagttatagtagctgttccagcgttatttagaaatatagaaaaaagtaaggcagttacatgtctttctaatagagaaaatataaagactcaaattgttattgcaatggctgaggaatcaagtaaagacaagaatgaagtcataaaagaggtattagaaaacaaagatggtaagtactttgaaacagaaccaaagtgtaagtcaggtggaatatattcagcaacgtttgatgatggttatgatggaataactggaatagaaagcattgcaaaagtgtatgttacttgtacaaaacatccagatggtattgaaatggctagggatatacatcaaagtatgaaagatttgattgcatcatttgcacaagacccttctataataccaggagcttcaaagggcaatgatgattttagaaaatatttattagacaataaatataaaaatgggtggcctacaattccagatgaatttaaggcaaaatatggattaagtaaggatacactatatatacaaccatatgcatataatcctactaaatctgatgctactgtagttgtatttgcaaataataagactggaggtaattggtatacttccctagtttacgattatgatgaaggtagatggtataaaggtaaaaatggtatttctgttgcaggtaggtcatgggatgttgacacagatagtgttaagtctgtaaaaacagagattcattctaaagagggatggggtcctttaaattaatatatcatgttttattaatctggtattgattaaactatagaaaagagcagtttctatagatgacgaataccagattttcatttatatgtataattaagatatattaaaagtatttatatttttaagtcttcacatacaagctaaagataattataataatattgtaaagaaatttaattataagattaattttctgaagatttagtatttgtactaagaaatacataaaaaggggaatagatatgaataataattttcaagacaaccaaacaataaatttaatacaaagtcgtagaagtatacgaaaatttacaacagagcaaattagtgatgagcaagtaaacacattattacactgtgcatttgcagcaccttcaggatgtaataaacagccttggcacataactgttgtgcaagaccagaaacttttaaaagagattagtgatgatactttatctaggattcatgaagtgagtaatgttgagataaataaaaactttaagttattttatggtgctccaaccgttttatttatttcttatgatgaaagtagttcatgggctccatatgatataggaatacttacagggaatataacaacagctgcacaagcactagggcttggaagttgtataataggaatggttagaggtttatttacacctgttgaacaaggggatattgaaggtcttgtgagtgtattggataaagaagatgtaaaggaatcagagtcaataaagatgaagtttgatacaaataaaaaatacagagaactacttgatataccagaagggtattctgtaccatttggtattgctgtaggtattccagatggaaatttaccaaatgctagagaggtagtttacaaagtttccagagtttaggataaagtattgcaagaaccaatcagttacttgaagaattaaaccagtaatatacaaataaattgatggaagaggaagctatttaaaaagtagtttagatttttcattgtaaaataattaaataaagaataaggtgataagtattttatttattatcttattcttttttatttttgttttgtagaatgataaaaataaggattaagtgtaataaaatagaaaacaagtatgttaattttaagtatatgctttaaaatttatccaagttaaaaatttaagatatcttttcagtataatggaaaaaatgtcaaaatattgaaatagggaaaaaatagtgatataataaaaaaaatagagaaaaaaagtaacccttagttgtaaaaaagttactatttattgaaaatttagatacttttctaaaaattatctatgttaatagttaaatttatgaacattttttgtttttatgttaggatatttcttagaaatgaaatacttcttaatttgatttgatatgtatatttttatagctattttattataaaaaaaaagaacccttttacaacaaatggaaactatgtacgtaataattaaaataaaaaatattattttatatttataaacattgacattctaattctgtagtgtaatcgtattttttattaattcttataaaatcaatgaaaataaggatatccattttaaagtacataaatttaaaaatccagaaaaatatacttaaattatgtaagcaaaagaggggttgaatcggctgaaaatgtaatactagtaaatagtacatcaatcctagataccctgtaagcaactctattttcatgtactaaaaatgtacctattttattaactgaaaagaataaattaaatgtaagtacataataagagataaaaaattaaaagcaaaaaatatttatataaataaatataaaaaatgatataatccctattaaaaaatttatagatgatgaagaaatatcaaaatcttatattataggaagaggcacttctttgccaaaatatatagaaaagcaataccaaatccaaagagaataggctgagaaaaaataaaacaaattcaagagtaatagaaaagctttatagaataaagaactgagaactctttatataataaaaaatggacttttaagagaaaatgatttaataaatgatttaacatggtgttttagcaggtgaaaataaatcaccagtaatgattgtagaaaaattactttatgaatctcaaaaaaacttagttaagagtaagagatttgataagataactaaagttggggaaatgtgtttgatgagataaaaaaattagtaaaatagtataatctaaataagaatattttgttgattaaactacactaatagtaatattgtagggggaaaagatgagagaagaatcgaactctttaagtttagaccatatagaaattttctttgaacttttatctcaaagtacagaagattatatatttttttgggatataaataggaataaatttaaaatttcttcagcaatttttgatgaatttaacttaagtaaagagatagaatctgatttagtcaattgttggagtaaaattgtttatccggatgatgttcaaatatggaaagatgatatacaagaattactacatggaaaaaaaggtgagcacaatttagaatataggttgattaataaatatgaagaaatagtatggatttcttgtagaggtaaagtttatgtgtcggatgacccaaaaactatatttctagtcgggagaataaagaatattggtgaaaaaaataaatttgattctatcacaggaacgtggaatagagaacaatttgaacatagaatgaattatcttataaaagagaaaatttataaaaatggtgctatgtttatcatggatattgataattttaaaaatataaatgaaaaatatggacattcttatggtgacaaagtattgcgtgcaattgctactgaagtattagaatatcttccaaaagatgtaagattgtataggttagatggagatgaatttgcatttttttaccctatgtgtactaaagaaactatagagaaaatatatgaaaagatacagatgtatacaaatactcagcatgaaattgaatcaaataagtactattgcacagtgactgcaggagttgctatgtatccagaagatggagataattatttagatttatttaaacatgctgatattgcattggatatagcaaaaattagtggtaaaaatagaattaagtttttttcacaagagctctatgaaaataaactaaaggtaatttcaatgcaacaaaaactaagagagtgcgttgaaaataattttaatgactttgagctgttttttcaaccccaggtaaatgctgttacaaaagaggtaataggggcagaggtacttttaagatggcattcgagtacttatggagaagtatctcctgttgaatttataccaatactagaacagagtaatttaattataccagttgggaagtggattataaaagaagctgtaaaacagtgtaaagaatggcataaaataaatccagactttaaaatatctgtaaatgtatcgtatattcagttaaaagaagatttttttagagattttatagtagaatgtttagtagagtatcaattaagacctgaatttttaattttggaattaacagagaattgttggataccagatataaatttactaaatgataaatttattagtttaaagggtataggagtatatattgcaatagatgactttggtacagggtattcatctttaaattaccttaaagaactgtctgttaatataataaaaattgaaagaagttttgttaagaatattacatataatagttatgaatatacttttcttgaatatattattaaattagctcatattataaatttaaaagtttgtgttgagggaatagagtcttatgaagagtatgatatagtaaaaagcttaggtgtagatattattcagggttttttatttggaagacctgtaagtgcctctgaattttataaatttcaactatcaaagtgatgtacataaaatgagatatatagtatataaaaatagggcaaagtggaagttttgaagtttattaaaaatttacactttaccctattttgttatgtcttctataaaggattaatatactacactaactattatatactttcactccaaatttagagattatttcactagctttttggacatcttccttagtggcatcaggaacatcttttagttcataatcgatacctaaactttcccatttgtgtattcccatagaatggtatggtagcaattcaaatctttctacatttttcaatgtagctacaaattgacctagtttttctaaattatctatatcatcagtaatgccaggaactaaaacatgtcttatccatacaggaatatttcttgattctaagtgtctagcaagttttaatgccttatccataccaacaccagtcaaatcaatagatttttcctcaaccatatgttttaaatcaagtaaaaccaaatcagtattatctaaaactgggtctatagtttctatatctacgaatccagatgtatccaagcaagtgtgtatatcattttcttttgcttttttaaataattcacttaaaaattctggttgaagagtggattcaccaccagaggcagttatacctccaccagaaaacttcataaaagaagtatacttaagagcatccgttattatttcatcaactgtgtattcttttcctgatttaatatcccatgtatccctgttatgacagtatttgcatctaagaggacacccctgaaaaaataatatatatcttattcctggtccatctacagtaccaaacgtttctatagaatgtatctttcccttaatcatagagttcacctcacaatatattttaataaccttatcaatagttataatatttgtctaaaaaaggccatcttataccagaaataattcaaatataagatagccttttatttttattttttacacagtagtaatcttagttaaagtataaaaatttaaagactaagccattttaccgtggaatgttctgtttataacatctaattgttgctctttagttaattttatgaagttaactgcatatccagatactcttatagttaattgtggatattcttctggatgttccatagcatcttctaaagtagctctatcaaatacatttacatttaagtgatgagcattttgagagaagtatccatccatcattgcagaaagattgtttattctttcagtcatatcttttcctaaagcagcaggtactatagagaaagtattagatataccatcttgagcatgttcatatggtaatttagcaactgaagataatgaagctaaagcaccattagtatctctaccatgcattgggttagcaccaggagcaaatggagcaccagctcttctaccatctggtgtattaccagttttcttaccataaacaacatttgaagttattgtaagtatagattgagttggataagaatttctataagttttattttttcttattttattcataaagctttcaactaactctacagctatactatcaactctatcatcattgtttccgtattttggataatctccttctatttcaaaatcaacagctattccttgttcatttctaatagttttaaccttagcatgttttatagcagataatgagtctgcacaaactgataacccagccataccacaagccatagttctaaatatatctctatcatgtaatgccatttctaatgcttcataagaatatttatcatgcatataatgtattacatttaaagtatttacatataatgttgctaaccaatcagtgaatggttcaaatttactcataacttcatcataatctaagtactcagaagttataggttcaaatcttggtccaacttgaacaccagatttctcatctacaccaccatttatagcgtataataaagttttagctaagttaactctagctccaaagaactgcatttgtttaccaattctcattgcagatacacaacaagctataccatagtcatctccccagtatgctctcattaaatcatcattttcatactgtactgaacttgtatctatagatactttagaacagaaatctttgaatccttgaggtaatttagttgaccatagaactgttaagtttggctctggagaaggtcctaatgtatatagagtatttaacattctaaatgagtttttagtaactaatgttctaccatctattcccatacctcctatacactcagttacccaagttgggtctccagagaataggttattgtaatcaggagttcttaggaacttaaccattcttaatttcataacaaaatggtccatatactcttgtaattcttcttctgttacgattccagcttttaaatctctttcaaagtatatatctaagaaagtagatgttctacctaaagacattgcagcaccattttggtctttaacagcacctaaataaccaaagtataaccattgtacagcttcttttgagttagttgctggttttgatatatcaaatccataagattcagccatttttttaagttcatttaaagctgatatttgctcagttatttcttctcttaatctgataacttcctcatccatgcaagaaacttctaatgatttcttttgctcatttttatcttctattaaagcatcaacaccgtatagagcaactcttctgtagtcaccaattattctacctctaccataagcatctggaagacctgttattataccagattttctagcagctctcatttctggagtataaacatcaaaaactccttggttgtgtgtttttctgtatttagtaaatatatcttttatttctgggtctaattcatatccaaaagcttcgcatgaattttcaaccatctttataccaccatatggcatgacagctctttttaaaggggcatccgtttgtaacccaactattgtttctaattctttatctaaatatcctggagcatatgcagctattccagaaacagtttttgtatcaacatctaaagtaccaccattttctctttcttttttaaataggaccattgcttcgtcccataattttttagtattttcagtggcaccagctaagaaagagtcatttccctcatatggagaatagtttaattgtataaactctctaacatttatttctttagtccatcttcctgttttaaatccttgccatgcattcattaagtatttcctccttagatttaaatgataaataatactattaaaattattttttatatacttaatttattttatatatttttttaaaaatatattttctaatataataatatcatattattcgtatcctgtatacataaaaaataaaaaattgtcgctttaaagtataaaacagattatatgttaataatgtggtgaaattatacccatatataaataaaataaaacaaataaatagctaattaaggagaaaatattttttattttttgtttaggataaataaattttattatggaaaaaagaaaaagcatacatcttcacaaattgaatatttatttaatagggggaggtgatagattgtttatcacagtggtattatttttagtaggtttcctattaattactaaaggcgcagatatctttataaattgcactgtagagataggtagaaaaacgaatatatcagaaattatacttggagctactatagttagttttgcaacaacattacctgaatttacagtgtctctacttgcttctattgatggtcatactactatgagtttaggaaatgcagttggttctataatatgtaatacaggattagcattagggttggttgtttttataagtccatttaatgtagataaaaaaatgtttttttctaagtctttactattaatagtatccgttatagttttaattttattgagtttagatggagttataacaagaggtgattcattattacttataataatattaatcttttatatggttaataattatagaagtgtcgttggaaaatctgatactaaaaatagaaatattaaaaataacactattaaagacatatctactaaaaaagggaaaaattatagaggtttttccgtattagaaattgtaaaaatactattactttttgctacaggattgataatgatgataataggttcacaaatccttatagagagtggagtaataatagctagttttttaaatatacctcagggtatagtaagtttaactataatagcacttggaacttctctgccagagatagtttcgtcgattactgctataagaaaaaatcatcatgaaatatcagtaggaaatattttgggtgcaaacatattgaatatagtatcagtaatagctgtatcagcaataccaaataacataccaatactatctcaaaatagacaattggatataccattcatgatattattattattaatagtaataataccaacacttaaatctaatagacttagtagaatacaaggtatattgatgttattcacatattttctgtacatatcaattttgtatttcatgtatattatttaactatactgtttaaaatattaattgcagaatatcctaaaaaagtatataatggataggttaagattaattgataacggagaggaataatatatgaatataacaaagtttgaagatttaccaataagtgagggaataaaaaaagctatagctgaaatggggtttgaagaaccatctcctatacaagcacagtctatacctgcgattttgtcaggtaaagacgttataggacaagctcaaactggtacgggaaaaacagctgcttttagtatccctatactagaaacaatagacccaaataatagaagtttacaagctgtagtgctttgtccaacaagagaactggcaatacaagtatcaacagaaataagaaagttagctaagtattcgcacggaataaagacattacctatatatggtggccagccaatagatagacaaataaaatctctaaagagtggtgtgcaagttgtaataggtacaccaggacgtacaatagaccatatcaatcgtaaaacattaaagatggataatgtaaaaatgattatattagatgaagcagatgaaatgctagatatgggatttagagaagatatagaaatgattttaagtaagattccagaagaaagacaaacaactttcttttcagctactatgccaagaggaattttggaattaactaagagatatcaaaaagacccagagcatataaaagttgttagaaaagaacttacagtttcaaatacaaagcaatactatatagaaactaggtcatcaaataaattagaagtattatgtagattagtagatgtatatgaccctaaactatctgttgttttctgtaatactaagagaaaagcagatgaattggtaggagatttacaagcaagaggatattttgcagatgcattacatggtgacttaaaacagactcaaagagatatagtaatggataagtttagaaatggtacaatagatatacttgttgctactgatgttgcagctagaggtatagatgttgatgatgttgaatgtgtattcaactatgacttaccacaagatgaagagtattacgttcatagaattggtagaactggtcgtgctggtagagaaggtatgtcatttacttttgtatttggaaaagaaatgagaaagatgaaagatatagaaagatatactaaatctaaactaataaagcataatataccaacaataactgatgttgaagagaaaaaagtaggtactttctttgcacaagttaaacaaactatagaagaaggtcacttaactaaacaattacaatggttagaaggtttctgtaatgatgaagattatgcaatggttgatatagctgctgcacttgtaaaactatctctaggtgaagaaatgaaagaagaaataatagaagaaaaacctagaagagagcgtggagatagaaaaggtggtactggagctaaagatggtatgattagattatttatcaatattggtagaaatcaaagagtacaagcaaaagatatagttggtgctatagctggagaagttggaataccaggtaaagtagtaggtactatagatatatatgataagtatacttttgttgaaatacctaaaaaagatgcaaaaacagtaattgaaaagatgaaagatattaagataaaaggtaataagattaatatagaaaaagcaaataagaagaaaaaataacgtatagtatacaaaactataattagaaaatatataaaataatatattggatatttaaaaagcctgatgtgttttcaaaacagatagtagataatctgtaagagttaacagcataaggcttttcttgttttatatgatattatgattttccagatcgttgtgaaaaatgtatattagttcctttttttcaaatctgatttgaaaaagagaatattaattatctatatagtttagattataataaaaaatgtaagataacaaaggggagaaaaagatgtcaatgacttatatggaccctagggtttttttgattttagaaatggtgttagaagaagacacaaatactctagaacaattttcaaatgttttgggtgttagtactaggactatcagaaactatataaaccagattaatcgagaattaaaaggtggtattgctaaaatagttaaaaatgaaaaaggtacatatagtataagaattgaggatgaaagtaaattaattgagattgtaaattttaatagaggaaagctatcaaattttataaatttaaattcacctgatgaaagaataaattatgttcttgatattttaactatgaccaacaatccaattaccatagatgatttggctgaagagatatgtataggaagaacaacattaataaaggatttaaaaaaagcagacagaattttagctgaatatgatttagaattaaaaaggaagccaaatataggtatgattttagttggtgaagaaatggatataagattattaatccttgatagattgtatgaaaattatattgatgtcttggaaaacgttaatcagataaatttagttaaagattatgatattgaatgtcttagagatgaattaaaaaagttgtttaaaaaagaagaactctacataacagaacaggtcttgagagatgttgaaagatatataatcatgtctgtcttaagaaatctaaatgggtacaaatttgaaaagatagataagagatttgaagtgataagatgttcagatgaatatactttaggattaaagctcaaagctttattggaaaagatatttaatatagttttaaatgaaaaagaaaccatatttttgacaatgccattaataggtagaaaagctcctagtacaaaattagcacttagcagtataaagataaatgatagcgtaaaggaagttgtagatgaagtaactagttttttattagagacctcagggattgattttaaagaagataaaaagcttatagaaaatttggaatatcacttgtattttgcacttaatagaatgagattcaacataagggtaaaaaatcctcttttacaagaaataaaggaaagatatacatttccatatagtgttgcaaagatagctgcaatgataattgaggaaaagtttgacttgaaaatatgtgaccacgaaataggatatatagcattacattttggaagttattttgaaaaaaattcaagaaaagttctaaatgtaaatagggtagctgttgtttgtggaacaggtcttgggactgcacaacttattagaataaagataggaaaaatacttggagaaagtgtagaagtaaatactttttctgatatagaagctaaagctaatttagatttattaaagtattatgatttagtatttacaacagtagatttcaaaacagacttagatgttccaatttttagagtaaatgcgttatttaatgaagaaagtataaagaaagagatagaaaatgcaatacttttgaaaaatagtataaatcttaagtctataaaaaagattgaaaaaaatatcccttttataggtaaattaattgaagaggataagttctttatattgaataagagtacgtttatggaaaatttagaagatatgttagaaaaattagttcataaaggaattattgatatagagttcaaaaaaaaggtattaaaaagagaaaagaaatcttcaacagcattagataattatatagcattgcctcactcagttaatactaatggggaaaatctttatctgtcatttggaatattagaaaaaccagtggtttgggatacaaaggaaattagaataataatattgatgataattccagataagaatgtagatagtacagacctgataataaaaagttatgaagaagtacttgaagtagggagagataaaaaaatgatagaagaacttgctaaagtaaaatcatttgatgaattttataaaataattaccaagaggaggtaataatatggacccagtaatttttattatagcatcacttattacagtgtatttattaaatatttttcttggatacttacagcttaaagattttaataaaaattatattgaactaaaaagaaaaggaagagtggcaataggcagaaaaaaaggaagaatttcatcaggtacaattgtgttgatacttataaatgatgatggtgtgattgtcgaaactagaaaaatgcaaggtgttacagtattggcaagagtaaagtcatttgaaggtttggtaggaaagagcttagagtacatagaaaaatcagatttaactgtttacaataaactacttaaaaaagcaatactagatgcagtcaaacagtacataacatttgagaaaaataaatgtgaagatacaaataatctgagtactgatgaagagtgtaggatggaagtagtttaaaaaaatatatttataaggaggagttaatatgacgcaattttttcaagtattagcaagtggtgcagatagttttatgaatttatttagggcaggtgggcaacaatttgtaggttttgtaacagatatagtaccacttttagtagcattattagttacaatgaatgcaattatcaactttattggtacagatagagtcgagagacttgcaaaaaaatgttctgcaaatatatttactagatatttgatattaccagtccttggtacatttgtatttgcaaacccaatgacactatcactaggaagattcttgccagaaaagtttaaacctagttactttgcagcagcaagcttttcatgccatacaatgaatggattattcccacatatcaatccaggtgaactatttatatatctaggaattgcaaatggtataacaactttgggattctcaacagcagatttagcagttagatatttgttagtgggtatagttgcaaactttattaaaggtgtagttactgactatacaacaaaatttgtagagaaacaacaaggaatagcattaaattcagatataaagattggataattactttaaggtataaataaatttttcaaataaaaagatagtgtatagaggaggataaattatatggcatttaacaaagttaaaatagtaaaaggttctggaggatggggtggaccattgataatagaaccaacagaaaagaagaataaggtagtatatgtgactgggggagcaaagccagaaactgcagtaaaaatagctgaacttacaggatgtgagttaatagatggattttcacagggtgttaaagatgatgaaatcgcatgtgtaataataaattgtggtggaacattgagatgtggtatatatcctcaaaagaaaataccgactataaatataatgaaaacaggaaaaagtggaccattagcaatgtttataaaagaagatatatatgtttcaggggtaaaaccaacaaatgtagagcagttataattgaggtagtaggagggaagaaatatggcttatgatactaaaaagaagataagtgagcagagtcaaggaattgttgcaaaaataggtatagcactaggaaatgtgacaagtactctttttcaagctggtagggatactatagatacattaatacatactatactgccttttatggctttcgttgcagtcctaataggtataataaatcaatcaggtataggaaattgggtagccaatttacttactccattaatcggaaatgttggaggtttagttgtcttatcaataatatgttcatttccgttgttgtctccgtttcttggaccaggagctgttatagctcagatagtgggggtattggttggtacagaaataggaaaaggaaatattccaccaagtttagcattaccagcattgtttgcaataaactcacaagcagcttgtgactttataccagtaggtcttggtcttgcagaagctgaacctgatacagttcaagtaggagttccgtcagttttatattctagatttttaacaggtgcaccaactgttctattagcatggttagcaagctttgggttatataaatagaagaatactttataaataattagagagaggttcagttgatatggaattaatatacagtactcaaataaataaaataggagataatgcaaatgaatttttacaacataatatgtttgtaactttcaaagataatgctcctcaagagttagaaaattactgttatatacattctgaaaataatttagtaaaagaaatacttacgaatgatgtgttatcaataaataatgttgattacaaaattacttctgttggtgagttagtaaaccaaaatctttcagaattaggtcatataacatttaagtttacaggtgaaaaagatggagcaattggagggaccttatatcttgaagaaaaagaaatagcacctattggcgtaggtactatactaaaaataattagaaaataaaatttaaaacgaatctaatcatattataagtaaattatagataaaagtcaatttaactaatcaagttaacttttaatgtgataaaaaaggggaaatgaaaatgagaaaagtggctttagttgttggaggaggaagaagtttaggtgaatatttatctaaacatttagctaaagtaggttatgatgttgctattgcagatttaaatgaagacaacgcaaaaaaagtagctgaagaaatagaaactgaatttggttgtaaatctgtaggatatggttgtaatgccatagatgaaagacaggttataagcactgttaaagctattgaaaatgattttgatagaatagatttattagtgtacaatgcaggagtggctgtaagtaaaaaaataactgattttggatacaaagattttaaatttattgtagacgtaaatttaaatgggtactttctatttgcaagagaagtatctaaagtcatgatagcaaaaggtattgagggtagaatcatacagataaattcaaaatcaggtagagtgggaagcaagcataattcaggatattcagcaggtaaatttgctggagtaggacttactcaaagtttagcgctagatttggcagaacataagataactgtaaatgcactgatgctcggtaatttacttgattctgatatgtttgaaagtttaattcctcaatatgcagtaaaattgggaatacctgaatcagaagtcaagcaagtttatatagataaagtacctttaaaaagagggtgtagatttatagatgttgcaaatatgcttacattttatgcttcaaaggaagctgaatactgtactggtcaatctataaatattactggtggacaagttatgtaaggtttttatggagtgtctcaagatgaactctttagttcatgaggcactttttttgtataaaattaaatatattttcatcatttaaacaatgaaaaagaggtttatctttattttgagatagcctcatttttgtaattaagaaacatagtgtttaagtaaacatataagattgttagttttttaaaagagaattttttaataatattatatttatgaagtatttttaaacttaatttgattaaaaaatagctacgcacacttgtgactttagtcatgagttagtagctaaattagtcagcatatagggaaacttatatgtagagataggatagaacctatccaatactacttgaattgctaaaaacccctaaagctaaccaaactaaaacataagggtgaaataaacctaagtgtgaaagttacgaaagtagaaaaaattggttagatggtataaggttaaatcctaagtactttaaaatgggcaatcagcaggtaaactccgaataggagaaacttcaacgactattcctcttgagggaagtacactacaagttatcggtagtggaagtgggtagaccttaacggataatgccgaaggataagatatagtctgtgcttgcatgaaagtgtaagaagttcataagagaactgcataggtagtagcgaacttatgtgaacgacaacctcaaaaatgataaaagttaagacttacggttcttatatatgttatttaaaaataaatataaaaaaccttcaaaatacttgttttaagtaattgcatattttaatattatgataggtgatgaaaaatggaagttactcatggtagaggatatgcatataatatgtcaaatatagacatccagtattatggggagacatctttggaatcctagttatttcgttgctactgtatcatgctactgtatcagaaaatacagaggagcagataagaaaatatattaataatcagaaaaaacaagtaaagtgaggtgatagtagtggaaaaagcttataagtttagaatgtatccaaataaaaaacagcaagagttaattaacaaaacttttggatgttgtagatttgtatataataagtatcttgctaaaagaatagaagtttataaaaatgctaaagaaacttttacttataaacagtgtagttctgatttgaccaatttaaaaaaagaattaaattggcttaaagaacctgacaaattttcactacaaaacgccttaaaagatttagataatgcatataaaaaattctttaaagaaaaagcaggatttcctaaatttaaatcaaagaaaattaatagattttcatataaaactaacttcacaaatggaaacattatgtattgtggtcaacatataaaactacctaaacttgatatggttaagataagggataaacaagtacctaaagggagaatacttaatgctactatatctaaagaaccaagtggtagatattatgtatcattatgttgtactgatgtagatattgaagcatttgaaaatactaataatcagataggtttagatttaggaattaaagaattttgtatctcaagttgtggagaatttatagaaaatcctaagtatcttaagaagtcattaaacaaacttgctaaattacaaagagaattatcgagaaaaacaatcggtagtttaaatagaaataaagcaagattaaaagttgcaagacttcaagaacatatagctaatcaaagaaatgattttctacaaaaactatctactaaactaataaaagataacgatattatttgcatagaagatttacaagtaaagaatatgattagaaatcgtaaactatctcgcttaatttctgatgtgtcatggtcagaatttattcgtcaattagaatacaaggctaattggtatggtagacaaattgtaaaggtaggtaaattctttgcaagttcacaaatatgcaataaatgtgggtataaaaacgaggaagttaaggatttaaatataagagaatggatttgtcctagttgtaatgaaactcacgatagagatataaatgcaagtataaatatattaaaagaaggattaagattaataacaattcaaaataaataacttatgtaagaaccgtaggaactacggggatagcctgtggagaattagtaagacatattttagtatgcaaaattctgtgaagcaggaacactgtgactttagtcatgggaggttcagaaaatatagctatgttttatatactgtagttttgaacatagaaagtttaataaattatagtatatattaatttttaataaggtaagaaagtagaaagaaggatattttatggatataataaaaaaattaagtcatggatgtacattagattgtcatgattgttgtaaattcaatgtttatactaaagaaaataatgtagtaaaaattgaaggagataaaaatcatccttatacaaaaggttttatatgcaaaaaagggatggctcatttagatagattaaatcataaagatagaataaagactcctatgcttaaagttgatggagtatggaaagagatttcttttgataaggctatagaaataatggcagaaaagcttacatactataaagaaaagtatacatcaaagtctgtcatgcattatgaccaatatggaagtgggtctgtgctaaaatacataggagatatattttttaatttttatggaggtgttagcagacataagggtggtccctgttggagtgcagggatgcatgctcaaaaatatgattttggagtagctaagagtcatgctatagaagatatgttaaatagtaaaagtatatttgtgtggggaaaaaatccagcatatactacaattcatactatgcaaataattaaaaaagctaaagaaaaagggataaagatagtagtgattgaccccatatatacaaaaacagctcaaatagcagataagtatgtacaggtaaatcctggaacagatggagctttagctatagctatggcaaaaattatagtagaagataaattatatgatgaagaatatataaactcgtatgttattggttttgaagaatataaaaaatatttatcttcattggaattaagttttttaattgatgaatgtggtgttaaagagaatgatataagagagttagtggatttatatactaacaaatattcaagtataaatgttggatatgggcttcaaaaatataaaaatggtggaaacacaataagagcgatagatgctttaggtgctataactggtcaaataggatttagtggtggaggggtaaactatgctaataaagtttatccaagtgttataaattctgacccttacaatagccaatcatatggtgaagatagggagttttatgtaagtaatatcagtaaatttatagaagaatctttaaaaaatacatcaaataaagtaaattatgcatcagatgaacttgatacaacatcaaataaagtaaattacatatcagatgaacttgatacaacatcaaataaagtaaattatgtatcagatgaacttgatacaacatcaaataaagtaaactatgtatcagatgaacttggtatggcattacataaagtaaattgtgtatcagatgaacttgatatgacatcaaataaagtaaattatgtattagatgaacttgatataacatcaaataaaacagattatatatcaaatgaattgtataatttatctaataagtcaatcaaagataatattcctataaagatggctgtgataactaaaagtaatatgctgaatcaactgccagatttagtagaattggagagggtgttttcaaaaattaaatttaaagtatgttttgatatgtttatgactgatacagctactttatgtgacatgtttataccgtgtacaaatacactagagagtgaagatataatttatagctcaatgaccaatccatatataacctataatgaaagagctgtaaagccagcacataaattgatggatgaatattatttctttatggagctagctaaaaaaatgggattaaatgattatccttttgtagaaaagagaacttatttagaaaaagtgattgaaccacttaagcgttttgacaaaaatctggatatagaaaaacttaaaaacaattactttactatacataaccttgttgcttgggaagataagaagtttgagactccatctggaaaatacgagctttattcagaaagtataaaaaacttgggaataagtccaacacctgtatatataagcaataaatataaagaaatagaagataaaaatatttcttttagattattaactaatcatcatgcagatactttatttagtcagcattttatggacaaaaaatctatagctcaagcatatataaatcagagaatggctaaaaaagtaggtattgaggacaaagatattgtgatattgaggtcaaaaaaggcaaaaataaatgtacaaataaatatagatgatggagtaggtaattatatagtaaaaatgtatgttggttggtggaagaaacatggaaatcctaatagtttaacagacactggtatatcagattttggaggtcaggtaacatataatgaaagtatggtagaaataatacgacaaaactagttaaatttcattgaaggaataaaaatataattatagaattgattaaaagttactatttttacaaaactattgaaggagggatttttgatggtaaattattccttagaacataagaatctatacatagaatttatgtgctcagaactagaccaccatgtagccaatgaaataagggaagaaatagataacttattaagtgtaaatcaagtaaaaaatgttgtatttaattttgaaaatattaattttatggattcttcaggtataggcgtcatcataggtagatataaaaagatttctaatgaagggggacgagtttcagtaattaatataagttcacgagttaagaagatttttgatttatctgggttaaataaaattattggcatttatgatacgtatgaagaagctctaagttctttgtagggaggagtatgtgatgaataatattatggaagttaaattttcggcaatatctgaaaatgaaagtttagcaagagttatagtagcatcctttgcagctaagttagacccaacagtagatgagttagtagatataaaaactgctgtctctgaggctgttacgaatgctataatacatggatatgaagaagacagttctaagtttgttttcttaagatgtgagatagaaggaaatactataaagattatagttgaagatgaagggtatggaatagaaaatgtggagaaggcaatggaaccactttatacatcaaaaccagaacttgatagatcaggaatgggattcacagtaatgaaaagctttatggacgatgtagaggtaagttctgtaaaagataatgggactagaattgaaatgactaaaaaaataaatgtgcctaaataaagtccaaaagtgaggttttattatggaagtaactgttgccagagaagaaaaaaaacctcttcttagtcatgaagagactctagaacttattgaaaaagttcaaaatggagatgaagaggcaaaagaaatattaatatcaagcaatttaggtctagttaggagcgttgtatctagatttttaaatataggatatgatagagaagatttatttcagttaggttctataggcttaataaaatcaatatataaatttgacccaaaatttaatgtaaaattctctacttatgcagtaccaatgattttaggtgaaataaagagatacttaagagatgatggtatgataaaagtatcaaggtcgttaaagcaaatagctgtaaaggcaaagatggaaagtgaagctttaactaaaaaattaggtagagagccaagtatagaagaattagctaaagcaatagatgtagaaaaagaagatttagtaatggctatggaagctaatttcaatgttgagtatttgcaaggagttattcatgaagaggaaggttctccaatatgccttattgataaaataagcatgaaaggagaaagtgaagaagaaaaagtagtggataacatattgttaaaagacatacttggaagactggataagagagagcgtcaaataatagttctcagatactttgaagacatgactcaaagtgaaataggagagatgctcaatatatcacaagttcaagtatctaggatagagaagaaagtattgtctaagttaaaagaatatatatcgtgataatacttatgatatgtagaataacaaaatataataaatatattactaaaataaaatgtaataactttttatgttaagtttttaaattattaaaagatactaaaataataaaaagcattaaaaaagtaaaaatataaaaacaaggtgtctttatggaaaaatagattttttctttattaggcatcttttttattttttgaccaaactttagatagtcaaaataaataataggtttatttttttaaaattaacaaataatactttagagaggtgtttagtatggataaaaattataaaaaatatgtagaccaaataagcccaaaacctacatatttaaaaaactatacacttgcatttattgtaggtggaattatttgtatgatagggcaagcaataaatgatttgtatatgaaagttggaggtcttgataaactaggtgctagttctgcaacatcaataacattaatatttataggggcatttttaactggattaggagtttacgacctaataggaaaaagagctggagctggttctataattccaataacaggttttgctaactcaatagtatctccagcaatggagtataaaagagaaggctatgtattaggtgtaggtgcaaacttatttaaaattgcaggaccagttttagtttatggtataggttcttctattttatgtggaattatttattatatttttaagatgttttagatgatttttatttaatttaaattttattaattatgaagaaggtataaaatctgaaaatagctactaaagtaactaattgaaaaataattgtgcagatttaattaatattaaaaatttgaatagtaaaatgcaaaattaaaaaggtgtgaaaatatgaaaaataaaagaattggaaaaagaacagtcaagttagaaaataaaccaaccataatatcaactggaactatagtgggtcctaaggaaggtgaaggaccactaaaggactattttgatatgattatgactgacgatttatatggtgaaaagacttgggaattagctgaaagtaaaatggtagagactgcatcccaacaagctatccaaaaggcaggtaaaaaattgtcagatgtaaattatatgctaggtggcgatttaataaatcaaatagtgccagcatcatttgcagcaagagaactggctattccatttttaggtatatatggagcttgttctacaatggcagaaggtctttgtataggttctatgcttatagatggtggttttgctgatttagtactgtcaggtacatcaagtcactattgtacagcagaaagacaatttagattcccacttgaacttggaaatcaaaaaccaatgacagctcagtggacagttacaggagcaggaagtgtattattagctcctaatggagacggtccaaaagtaaagtatgttactgttggtaaagtaatagatgagggtattgatgatggtaataatatgggaccagctatggctccagcagcaatagatactatctactcttactttgaagatactaatgatgacccaaatagctttgatataattgctactggagatttaggtactcttggaaaacagatagcagaagactttctaaaagaaaaaggtgtagatatatcaaaagtttatactgactgtggtatagagatgtttaaccttaaagaacaagatgtccactgtggtggaagtggatgtgggtgttcagctacagtgtttgcaggatatatatatgataagttgagaaaaaaagaatttaacaaagtaatgcttgtatcaacaggagcactactttcaccgacaagtacactacaaaagcagacaataccatgtgttgcacatgcagtagtaatagtaaatgagtaggaagtgatataatatgttaatggactatgtaagagtatttattgtaggtggaattatatgtttaatagcccaagtaatgatggattatttcaaaatgcaaactccatatgttatggtaacgtatgtaacaactggtgtagttttaacttttctaggactttatgagccattagttaagtttgcagcagcaggtgcaacagttcctataataggatttggatattcacttgctacaggagtaataaaatcaattcaaagtgatggttttttaggtatttttttaggaggtacaactgctacagctggtggaatagcagcagctatattctttggatatattatgtcagtagtatttactccaaaagcaaaaccataaatctttattaaaagaataataagtttttgaaataataactttttataaagcaggtggatatcttttagattccacctattttttatataaagaagcgtttacataattgaagttgacaattatttacaacatagtgtagtattatattatcaaaataaaatgaagtgaagtaggggataaagatggtaactattaaagatattgcaaggaatctaggtatcagttattcaactgtttctaggtgcttaaacaataatcctaatgtatctgaaaaaacaaaaaagaaagtagtagaagaggcaaatagactagggttccattttaatgtaaatgcaagaaatttagcaaaaaaagaaactaacaggataggggtaatcttttcaaataattttaatcatcaagatactagaaagttttttagtgatataatggatagttctataaattctattgagactaataaatacgattttataatacagcctaataataacattagtggtgatagtaatgtatataaaatggtaaatggacaaatggttgatggattagtaattgtgtctcaatcaataaaaaaagaagagtatgattttttaaaagacaataattttccacatgtatttatatattttaaaccatcttttgtaggagaagtagacaatttcttttgggacgataacgtgtatggaggttatatagctaccaagcatttaattgaccatggtcataaagacataataacagtaacttcagatgataggagttcaaaaatgcatgaagatagaactaagggatatttaaatgctatggaagaggcaaatttaaagaccgaagtcattaaatctaaaatggattttgaatctcaagttgaatttttagaaaaatatattgataaaataaaaaaagcttcagctatatttgtacaacaagatgtacctgcgatttctataatacaagagttaaaaactacttatggtataaatgtaccagaagatatttccataatagggtataataatattgaattaatatcatattttaggtcgcatttatcaacaatagatgacccaagagagcaagttataaaaaatggagtagatagtttagtaaatataataaataaaaagagtacagaacacattccaagaaaattatatccaaggttaataatacgaaatagcgttaaaagaataaagtagtaagcttttaagtatcaaaagtttattaaaaatattatagattatgtgaagttttttaacaaacaatataaataaaaattaaaaggagtaggtgtatataagtacattgtactcctttatttattgagatagtttttataatatgaatgaataattttattcaattatttgaaaatccgttattttaacaatataaattaataaattatttgtattttatatcatgaatctataatatttttttgattcataactaaaagtatataaaaatgatgaataaatatatattatacattatcaatgataggttatataataaaatcactaacaattatattataagaaaattataaaaattacaaggaggtatagaaatgaaagaaaaagcagggattagaaatgccataatagcagcctttataatcacaatattggcagaattaattggacctatttcatttaaagttatgggaataaatgtaactttacttagtatactatgggctatattcataggaatggctgtttctcctcatttattagggagagttataccagccttaaaaaagtttataggggataatgaaataaatgtatctccatatttattatctttgacactatatccattaggaataatgtttggaattaatgcagggcctaaagttggtatattacttcaagcaggaccagcacttttattacaagaatttggtcatatgggtacaatgttgatagcattacctgttggagtagcattaggtcttggaagaagtgcattaggtggtactttttcattatgtcgtgacacagcactaggcattattggagataagtatggattaaactcaccagaaggtataggaacactaggaacttacataagtggtagtatatttggaacattattattttcatttttagcaccagtgggtgtacttttaggatttcatccatatgctttagcaatggcatcaggaatgggtagtggttcaatgatgggagctgcaacagcatcattaatgaatacggttccacaaatgtcagagcagattttagcatattcagctactagtggattgattacagctgttactggaatatatatagaattattcttatctttaccagtagccaactactattatagcaaagtagctccagttattgaaagatttagaggaagaaaaacaagaagaacaagtaataaattgtaaaggaggatatatatatggaaaaaacttttaagactattatggagcagataaaaatagtattgtttatatatattattacttgctttggacaaatgatagcacttaagactcaggctcaagatttgttgattggaagtatatctggatttttgttggtgataattgctattataataaagaattttgttaaaaaacctaatttaccaggttttgcatgggctacattagttgcattcgttttatcgcttccaatatctccagtgggggatatcatagcaacaaatgtagggaaaatcaattttatgtctacagtaacaccattattagcttttgcaggaatctctgtaggtaaccaattagatatattaaagactttgagttggaagttagtagttatatcatttatagttatgacatctacttactttggttctgcttttatatctcaaacagttttaagattaaatggaatgctttaaggaggtagtaaatatgaatgaattaaaagcaaaaattaaagaggaaataaagttattatctgaagagaaaaagacatcatttgaaaaagtttctgactatttattttcaaatccagaattagcatttgaggagtataagtcacaaaaagcattatgtgatttgttagaagaaaatgaatttaatgtaactaaaggtgtaggaggattagaaacatcttttgaagctgtgtattcaaatggaactaatgggaaaacagttgcttttctagctgaatatgatgcacttccaggaatgggacatgcatgtgggcacaatatcatagggacaagttctgttggtgcaggtatcatattaaaagaaatcatgaaaaaacataatatagaagggactgtaaaggtttttggaacacctgcagaagaaagagtaggtggaaaaataactatgattaaagaaggtgtatttaataatgtagatgctgcattaatcttacatccaagtgatgcttcaatgcctgatgatatatcatttgctcaagttaatttaaaatttgattttactggtaaggcatcacatgctgctgcttttccttgggaagggaaaagtgccttaagtggagtaatagcactatttaacagtgtaaatagcatgagattacatcttaaagattatgcaagagtacatggaattataactgatggaggtagcatacataatataattcctgaaaaatctacagctatatttaatgtaagagccttaagcatagaatatttaaatgagatttgtgaaatgcttaaaaattgtgctaaaggagctgcaatttctactggaactaatgtagaaatagttcaattagatgaaatatacaaagagattaagaatgattctgaattagtgaatatagttagacaaaattttgaagttttgggtgaagactatgttgaaagagatttaagtcaaggtataggttcaactgatacaggaaatttaactcatgagatacctgcaatacaagcatatataaaattaaaagaaaatactgcaactcatacagatgaatttgctgttgcagctggtggtgaagaaggcaaagtagcacttataaaagcaattaaggtgctagcaatgtgtggagtagatattttgtatagtaaataatatataattttaaaatatattaagaaaggaaatcggattagacatgatattaaaacaagtaatagaggtttatgacattttagataaagcaaatgctaatggggaagaagtaaaaacttacttacaaggttatggtgaagtagatgtaactgtaaaagaattgtcttcaagtaaaggttcaacagatttagtaaagcttacaattcctgggaaaaatggaaaattaaaaggtggagatgctcctactcttggtattttaggtagattaggagggattggagcaagaccagaagttataggttttgtctcagatggtgatggagcattggtagcaattgcagtggctgctaaacttttggatatgcaacgaaaaggggacatattagatggtgatgttgtaatttcaactcatatttgcccagatgctccaactaaagaacactatcctactccttttatggattctccaattgatatgatgactatgaatgaaaatgaagttgatagtagttgtgatgcaatactttctatagatactactaaaggaaatagagtaatcaatactagaggatttgcaatatcgccaactgttaaagaaggctacatattaaaaactagtgataaccttttagatattatgcagactgtaacagggaaatctccatttgtattccctttgtctattcaagatataacaccatatggaaacaatctgtatcacttaaatagtattttacaaccagcagtagctacagatgcaccaatagtaggagtagcaattacaacagagatgcctgttgctggatgtgctacaggtgcaactaattttagtgatttagattcagctgggagatttgcaattgaagttgccaagctatttggtagaaataagtgtgatttctatgataaagaagagtgggaaatgcttattaagagatatggcaaattaaatagatttcaaacatttggtatacagtaattagaaaaatattaagtttatataatttgtgatacaactatttaagaagatataaacaattaggaataaaagtaagaataaagcacttagttaaaaactttaaaaaaaaatatttatttgtttatataaaaaggaggattctggttattgggattctcttttttatgaatacaaataatatattgtaattataaaaaaaggagcgtttcaaagtgatttttttaatcaccttgagacaactccttatattttttatttaaattctattttttattgactgtatagctattttcaccatcataaggtggcatgaccttgaacagcgtggttttgtaaagttgggcaccacaaaacaaaaaatcaacaagcccttgtgtggtctgctgacgtgtttactatactatactttcccaaaaaccgcaagcactatgggaggctataaggcggcgaccattcaggggcgatcccctcgaaaccgggatagggttcccatgtgggacataataaagagcgccccggaggtatcaactaccatccggggcgctctttattatgtcccgtgggaaccatgcccacgaagcagggcgtacaacggacagataggtcctaccctcctgacagactggaatctcaatcccatcgaaaacaatcataacaatcatggcaagattatatacactcctgtaaaatatttttgtgtgtaccatgaagtactgcttgccactattgagaacggataaaagggaagtacgtattataccaataaggtgaacgaaacaaaatactcatttgataaagttaaataaacctgtcggaaccccaccaatccggcaagagctcactcaatttaacagttttttctgtttcgacattaactaaaatctcaatacaagcactatccttatcaagttgcattaaatattcacgacaagcaccacatggtgagccaacactcccattgctcatcacacaaactaatttagtaattttactttcgccatttgttatcatattggcgatagcatttctttctgcacacattcccaatgtacaggctgtatcaatacacacgccagtataaacatttccgctgtcggtaaggattgctgcggcaaccccaccagcatcgataaaaggtgaaattgtgcgtggatttaattttcccctagcattattataaagttccttccatttcatcaggttgatcctcctgttgtatccatataaataatcttttatacgccttttccgcctaaggcacacaacacattactcgcttttttcattctaatattcgtgcgtgaaaatgtcaaacggtttacttcgtttcattacttcatactgctgttcataaccctgtttgttcacttgggcaccattcgagcaccaatttacccgtttcagggttgtagcgaacacagcagaaatgctcatttcatgggcttttctggctagaaaaaaaattttatcgctgccagatatttactattttttattaagttgctggagttccaccaccatcaggaggagtagtagagccaccaccattatttccaccattatcaggaggagtagtagagccaccaccattgtttccgccattatcaggaggagtagtagagccaccaccattgtttccgccattatcaggaggagtagtagagccaccaccattgtttccgccattatcaggaggagtagaaccgccaccattatcacctgtgttattattgttattattattttcttctggttggttattgtctggtttttttgtatcttcagatgatggttgagaacttactttagtaggagcagtaccttcaataaatgctgctttagagccagaagattgctttcctccatcctctaaattaatttttgtaaaatatacatttttaggaacttcaaattcagtaaccgttaaattagcatgtattttttccataattttttcccatagttttgcagtactagtacttccatgtggtacttctctacgttttatagtgttaccagaatcatcttttctaccagcatcatctccaatataagttgcaccaacataataaggagtgtaaccgacaaaccaagcatcatatgcactatttgtagtacctgttttacctgctacaggcattccctttggaagtgtagcaacaccaccagtaccttcagtaattacgctttctaacatatctgtaacaacataagctacttcagggtctacaactttatgttcttcaggagcatttttaactaataattgaccatcaaaggtagttatagtagtaaaaatagaaggttctacataaacaccttgatttgccaatgtaccataagcagcagccatttgaagtggagtaataccattcgccataccacctagtgtcaatgatgggaattttctatcacttgcttcagatgaacctgagtgattattctttaaagttgttataccaaagttctttaagtaatccatcattatatctacacattcatcataagagtctccaagcatttcagcagttttgacagctatcgtgtttgaagatttagcaagtgctttacgtaaactcatagaaccatgaccagcagtagtagttcttggattccatttattattttcttcaaacttatatcctcctcgagaatcacttagagcagttgattgtgttatttttagggtatcaatagcaggtgtatatattgctaaaggttttatagaagaacctggctgatgagggttagtagcacgattcaaagtttttctaccacttatatttcttcctccagctagtgctcttatttcaccatttttataatctaagattaccattgcagcttgtggttggctaactccatcagggccgaccatatgtcctgggaaattgctatttctatcaaattcttcttctaaagcatcttgcattttagggtctatagttgtgtttacaattagaccaccattgtagaataagttttgagcttcatcatttgtatgtccttgttccattaaagcatttataacttcactttcgataaggtcttctacagatgaagaaactttatctgatgattgaggcaattttatttctattttagctttgattgcttcatcatattcactttgttttatatatttcaattctaacattttctttaaaacaatttcttgtctttttttagcttcagggttacttacagcctttctaacaactaatgtacctgcttttaattgtctataagtatcattagatataagctcccaagattttattttttcaatcatatcaaagtccacttgagtagggtcatctaaatcatcatcagttgtgttaacaaaaaataataatttattttctaaatcctccttagtttcatttccctctaacttagaagttttataggctgaaaatcttgatggatttttagttgaaccagcaagaagtgctgactctgctagagtgaggtcagctgcagacttatcaaaataaccacgtgcaccagcctcagcacctgctagacctctaccaacgaagaagttatttaaataagtttctagtattttatctttacttactgttttactcatctcatgtgcatagtaaatatcctttattttacgaggtatagtttgctgttcagttgttaacagcattttggatacctgcataggaatagtactaccaccttgcttagtacctgtaagggtctttaatactgacctaaataaacctttaatatcgacacccttatgctcataaaaacgctcatcttctattgcaattacagcatgttgaagataaggggaaatcttatctaatggaacgggtgtctttttatttacacttggagctgtagacaatgtttttccattagcgtatttaatagtagttgtttggttcgtctgtttatctaaaacagcttctgtaactggagttacatctcttagtgacgcaaatactagaccagcagtacctgctgtaccaacaactagtaaaactaaaaatactatcccaaatactcttagttttttaaatttatcgctttttttagattttttcttgttttttgttgaacgagtcttgttagctgaagttctattaattggtttatttgtattaccagatgagctaactttttttctcctgattttatttccatttttatcattatcgttattcataagattttaacctccttacttaatgcaatattataacacaaataggagtagttttgtaattaatagaaaaaatgaatttgctataatattctgtacattgtatatgtataaacgtaatatattaaaaagtctatatttttattttatttatttttgacaaatattataaaaattatgccaaagctacatataaataaataggaggggataattttgaatagaatagtagatagaaaaacaaaaaatgaatttagaaaaatcatagctatttttttagtaattcttttcttgtctgtatttataggcagttttatatatatagataaaactttaagaccgacaataacagttttagcagagactaaagctcttgaactagcaaataggtcgataaataaagctgttgctgagatggtagaaggaaaaataaattatgaagatttaatggatatacaacttgataataatggtaaaataactatgatacaagcaaacactataatgatgaatgaaattgcatctgcaatagctttagaaatacaagatgaattaaaaaaggataagacagcaagttcttacatacctataggaacagcattaggaagtcctatattagctaaatacggtcctaaacttgaagtgtctattgaacctataggaacagtatcagtaaactttaaaacggaatttgagtcttcaggtataaatcaaactagacatagaatatatttagaagctcaaacacaagttaaagtagtaataccacttataacttcaacaaaacaaattaaagctcaaatacctatttgtgaaactataatagtaggtgatgttccagaaagttatgtaaatattccagaaaaaaatctaggaaatgttttacctaacactggaaagaataccaacaagtaatataaagttgtatatttttaaataaattcaaaataatagtttataaataaaatttttggaaataatattaatataattttaataaaaatttatattttatactatgtaaaatatctaatatatttggtctgtaggttaaataaaagtacctttagaccaaatatattattaataacttaataacatcttaaaacttatttatttatattatttacaacatccatttaataaatacaccataacctacagctgggtcattttcaattgcatgtgacactgctccgattattttattatcttgaactattggagtaccactcataccttgtacaataccaccagtttgagctaaaagctttttatctgtaattttaattttaaaacttttactttctggatgtttttggttttctatatctataatttcaatattatattttttacacttattaaagttatcttgtaaaattatttgagcttttcctaatttaacttcatctaaagatgctactttatatttttttaaattggaaatatcaaagttattaatttgacctcttattccaaaatcagtattttctgtaaagctaccaataatattttctcgttttgcatttatacatccaacactacctttataagatttttctatattaaggtgcttagttgtagaaattgaacctgttttaataggtatttttcttgcattaccaacacttattggatgacctacagctccaaactctgatgtatctggattgatatacgttaaagtagcaaatccagaaagtaaattgttaaaactaattttttctaatatgtgtttggtagttttcattgttataagttgtccacctctatttaataaaatagatacttgtttttcttctggtaaagcatttaaggtattggcaaagtcactatatccatcaacttcagaattatttacctttactatagcatcacccaatctaaatggagatgcttctccaggatttctaactatgatattttttaattctgcgtcaatttgaagtacgtttccaattggtattaaatattcaggttcatttttttgtaaattttgtgcataaattaaattatttgagaaaaaatataataaaaataaaaatgttaaaacaattgtaaattttgacttagctaagttggtttttttacttaaagtattatttttaaaatgaaaatttttaagttgcataaaacacctctttcttattaaattattttaataatagaattgaagttttcttgctgcttctatattatgttgtgcaagaattatgttttgatgcttggaaaactgactcaataacaccttagttttcataaaaataaataaaataaatagtgtatatgataaaataaatacatattcatataaataaaaataaacaataactgtctagcataagaaaggagcaaaaaatgaaaaaatatagattgttagttacttgtataattgccatgggaatcataattataggaacatcaaatccagttagcaatttttacaagactacaaatttgattagttcaggaaatatcacaaatgaaaaagcagataaagatgaaaattcaaacaaaaataataaagataaaaatgaagacaaatctaattctaaaagtaataaagataagtcatcagaggacaaatcgtcagataaaaaaaataaaattcaaaaaaataaaaaacttttaatttgtatagacccagggcatcaaggaaaaggagatagcaatttagaaccagtagctccaggttcttcctctaaaaaagcgagagtatcttcaggaacagagggtattgctacaaaaaaaccagaatatgttctaaacttagaagcatctcttgttttaaagagtatattagaatctaaaggttataatgtaataatgactagagagacacatgatgtaaatataagtaattcagagagagcaatacttgctaatgataaaaaagcagatatggttgtaagaatacatgcagatagtttaaataattcttcaaaaactggagcatctatattgattcctgaaaaagatggaaaatatacagctcctatatatgaagagagtaataaatgtgctgaatttatcaaacagaatatggaacaatcaggtatacaaatcaatggaatcgttcaaagaggtgatttgactggatttaactggtcaaaagtaccagccgtattagtagaaatgggatttatgagtaactataatgaagaccaaatgatgtcaaatccagactaccaaagaaaaatgatgcagtgtatagctgatggattggatgcgtattttaaataagatatgaatagagaaaaagttaggttggtattattttcctaatttttatctctattttttattgtacataatgcaaagaagaagtttattttaggttaaattgtcgtaaatataactaaaaatattgggaatacttgatttaagtttaaaaagaatatattatagtatagaatgtgtaaaatttttttgagaggtgttgaaatgctagtagtagaaaatgtgagtcatggatttggtgcgagaacaatattagaaaatgtatcctttagacttagaaaaggtgaacatattgcactagttggtgctaatggagaaggaaaatcgagttttttaaatataataacaaagaagcttatgccagatgctggaaatataaaatggtcttcaagagctacagtaggttacttagaccaacatacggtattaagcaaggaaaaaactataagagaagtgcttagagaggcttttaagcatatgtttgacttagagcaagaaatgattgctatgtatgacaaaatgggagaagctagtgatgatgaaatgagtaagcttcttgaagaaacagcagagatacaaactatacttgaaaatagtggtttttatatgatagatgcaaagatacaagaagttgcaaatggtcttggtcttggagaaattggtcttgataaagatgtaactgacttaagtggagggcaaagaacaaaagtacttcttactaaacttctacttgaaaatccaactattcttatattggatgagcctacaaactatttagacgaagagcatataacatggcttactaagtaccttcaagagtatgagaatagttttgtcttagtttctcatgatattgaatttataaataatacatgtaatgtaatatatcatatggaaaatggagagttaaatagatataaaggaaattatgatgaatttgtaagacttaatgatataaagaaacgtcaagaagaacaagcttatgataaacaagttgaagaaagaaaaagactagaggattttgtagctagaaataaagctagagtagcaactagaggaatggctaacagtagacaaaagcaacttgataagatggaaatattagaaagaccaaaagaaaaaataaaacctacttttgcttttaaagatgctagagcagctagtaaaataatttttgaaacagagaatttagttttagggtatgatgaagcattgacaaaaccacttaatttccatttagaaagaggaaaaaagattgccttaaaaggaatgaatggtattgggaaatctactctattaaaaactttacttggaataataaaaccatttgaaggaaatgttaaattaggtgactatttggaagttggatattttgaacaagagagttcaagggaaaatagtaatacacctatggatgaagtttggagtgaatttccagggcttacaaactttgaagttagacaggctcttgcaaaatgtggacttacaaatgaacatataacgagtcaaatgagagtattaagtggtggagaagctgctaaggttagactttgcaaagtaatgttaaaaaatataaatttcttagtattagatgagcctacaaatcatttagatgttgaggcaaaagatgaattgaagaaggctatcaaagagtttaagggaacagttcttttagtatgccatgagccagaattttattcagaaattgttgatgatgtatggaatatagaagattttaccactaaaatcgtgtagtgatttaacttattgctggggggatttcatgaaaaagtttctaaatgtacttttttcagtttgtattagtattgttataatagtaggtgttattaattttactgttggatttaaacaactttattattttgacattgattacttaaatatatcagagttatctggtttatctgaagatgatataaaattgaactacgattatctaattgattataacttaaataagaatgtgtctgagttcaagttaccaacattaaaatcttctccacaagggaagatacattttgaagaagtcaggaatatatttcaaaatataaataaattagctaaattattattggtagtttttttagtaggaattatattgagtgtaaaaaataaaaatataaaaatcttgaaaactacatcaataacacttataattatgccattattattaacagttccaattttattaaattttgaaaaatcatttattatttttcataaattattatttagaaatgattattggatatttaatccaaatttagacccagttataaatatattgccagaggaatttttttttcactcaggaatgatgattttaatattaattttgttagcaagtatcttactatttgtaatgtatagattatataaatctttcaaaataaaataagatagcaaaaacgaattatattaaaggttatacaataaaaatagctatgtaataatatttaaactaagagtagtcgataaatatttatgcatagctatttctaatagaaattactttttactagtgattttaactaaatcttgaaatttgcccataatgtaattgtaattatcttttttgtgaggtaacatgcaactactgcaatctttgatacctttatctgtatacttaaagtttccaccacagttttctcctaaagcatacaaaggacaatagcaaaatagacagttaaactcttctggtttattagttttatgacaagggaaaaattcgcaatctttgtgattaaaaaacttataattttcgcccatattttcctcctaattaaataaaatttaaattttttatactatataagattttggtgataatataattatactaaataattttatgaatagtcgataatatagtattattaatcatagtattaatggtataattagtcaacagaaaaataatgtaaaaattatgtaagtgtattttgtaattagaatatgttttataacaaaaaatgaggtgattaagtgaaagaaattcaagaaaaagcacttcttgtaggtctgaatttgactacaatagtgaaaaaaaatgatgatatagacactagtgaatctatggaagaattaaaagagctaacaaaagctgctggggcagaagttgtaggtagcttaattcaaaataaacattctgtagatgcagcttattatataggaaaaggtaaagtagaagaaataagagcctatagtgactctttagatgctactttagtaatttttaatgatgaattatctggtgctcaaatcagaaatatagagaatgttgttggaagaaaagtaatagatagaactactttaattttagatatatttgctcaaagagcacttagtaaagaaggtaaattacaagttgaattagcacaattaaaatatagattgccacgactttatggaatgggtggtgagatgagtagaacaggtgcagggattggtactagaggtcctggagaacaaaaactagaaatagataagagacatatacttaataaagcagcagacataaggcgtgaacttaaagaagtaaaaaagaatagggagacacagagagttaagcgtttaaagtcaaatataccgattgtagcacttgttgggtatacaaatgcaggaaaatctactcttttgaacgaattaataaagacacacaaggattatgaacaagaaaaagaagtttttgtaaaagatatgctttttgcaactttggatgtaactctaagaaaggctcttttgccgaataaaaaagaatttttagtagtagatactgttggatttgtaagtaaacttccccatgatttagtagaggcgtttaaagcaacattggaagaagtacagtatgcagatttaattttacatgtaattgatgcgacaaatactagttatgaattgcaaaaaagtacgactgaaggtgtattaaaagaacttggtgtaaatgataaaaaacatatacttgtatataataaagtggataagctagaattggatatatatcctaaaagtcaagaagatattgtgtatatttctgcaaaacaaggcataaatatggataagctattaaatatgatagaaattgctttaatggaaaatacttattcagtaagcttgatgttaccttatgagagaggtgatatatttagtagaataaaagataaatataatgtggagaattttgagtatggggaaaatggcataacgctagatgtaaacttcgatgaagaagattttaatatctatagagagtacatactagaaaaataggttgaatatggatataaattgggaaaatatagataatcttgaagattattttataacctatcttctttataaagaatctaaaacagtatctcaaattagtaaaattagaaatatttcaagtactgaagcaggtgagcaacttatacaagcaaaattaaaaataaaggaaatgcaaaaagatgattttgaggcatctaaggatattttagataaatttttagaactagataaaattaagagacttgattttatggatagcttagatgacgaaaaaatggtatactttaagagaaaggttttcaaaagaatccttgtggaaaaaaatgctgaagatttaattgttttaatttgggcgacaggtgagctaaaagatgatagattcttaaagttgcttcatcagctcacaaaccacagacactcagatattagaagaataacttattcagcaatcagaaagattgaatcaccaagtagtagagaagtactgcaaaaaggtctctacgataaaaatgcacaaactagacagtattgtgcaaaggctctttcaaaactaggggatgaaaacagtttaaagattttacagcagttgaaagacaagaataagaattttgaaaaagaatatgtgcttagagcttatgacgaagccattaagtcattggaaaatgcaaaaaatttgaaaaagtaattttttattaaagcaatttgtttacttaatgatgtatttctagagtttaacaaggtaataaataaattaatgggaggggtttcaaatgatagtaagacgttgtgcaggtggagtagtgttttatgctaataaagtacttattgtaaaaaatgataggggagaatggacacttccaaaaggaaagatacttggaggaggacttccatatgagagtgctgttcaaagagttaaagtagaaactggcatagatgctaaaatgatagatgtggctggcgatactatgtatgaatttttctcaagaagtagacaacaagaagtttgtaatgcaataatgtggtatgttatggaagcttgtaacactaattgtgtacttgctcctgaatttcaagaaggtggattttataaagtaaaggatgctttagatatgttatcacatcataaagagcaagctttagtagaagtatcttataaaaagtttaaggaattaaagaaattagtttcagagggcgatgatgttccagcaaattaattgtgaatttagaggattctgaggaagggatagccccttccttttttaattgaagcagttttaagcgtaaattatatagtctctttaaattatgatttatcaatttagagctttagtagtttatatttaaaatcagtaagatatatttaaaataaaaattaaaaagtatacaattttattatataattgtcttatgatattgattaaagaagtattaaaagtccatttatttttaaatagaataattttatagatatataatttgatgtgtatattagaaaatgattaaaataggaggaaatacaatgagcaattacaggacattacatgaatttggaacagatgaaataactattgaaaagtctgtttttattggatatgctaagcctataaagagtgaagaagaagcattagagtttataaatgaaataaagaaaaagcataaagatgcaactcacaatgtgtgggcttatactgtaggtaaaaatatgaatatacaaagatatagtgatgatggagaaccacaaggaacagctggaatacctacattagaggttataaaaaaagaagatttgagagatgtagtggttgttgttactaggtattttggaggaacaaaattaggtgcaggcggtctagttagagcttatacaaaaggtgctaaattgggacttgaagcaggtaagataatttataaggtaatgtatcaagaagttaaggttaagatagactatactcaacttggaaaagtgcaaaatgagttaatgaatttggggtattttataaaagatactgtatatgaggataatgttgagatagtagtgtattcaagattagaagatgtagagaaattatcagaaaaaatgattgatataacaaatggaacaggaaaaataattttaggagaggaattttatttgtctgaacaaaatggagaaattttaatataatctaaaaggttattagaatagttaatacctcaaatagccaattagtatttttaagtgaaaagccattaaattgatttaatctaaatcaatttaatggctttttatcggattttgcacagaatcctttttttacttcaaataaaccgactaaaagtaaaaatatcccaaatattttttttaatatatctgaagacagataattagctaatagtgaaccaaatacagctcctaaaaccccaaacacagctataggtataaccaatttaaaaattacatttttattttttatatgtatagcaagtgctataagtgtcatagggatagatgaaagtaaatttacgctttgtgctattttagtgtctatgccagcaagtaaaacgagtgcaggtataaggattgttcctccacccattcccattcctccaataattcctgcaaaaaatccaattagagcaaataacattaaaacaccatccttaatgctgcaattatcataattattccaaaagaaattctaagaaactttccagtaaccttatttagtaatttagctcctataataccaccaagaatacttccaactgcaactttaattgttaagttaacatcataagtacctttagatacatataaaacagaacttgctgtcgttaagaatattattatagaaagagcagttgcatgagatttatgttcttctaccttaacgatgtcatttaatattggaactaaaagagtacctcctccagaaccaaaaactccatttataaatcctgtaaaaactccaattatcgtattttttaagttaaaatcaaagtattttttctttaaatcatcagtttttttcataaaaatcaccttctgaaatagttttaccaaaataggcaaattatatttatataaaataagattaaatataatctttcatgtttgtttaattttgcataaaaaaaaacatattaaaacaacatattaatatatggtataatatattaaaacaaagtagcaaatttgagaggagataacaatgtcaaatataaaaatacaaatagacaaaactgtagaatggcttataaataaggttaatgaggcaaatgcaaaaggattaattgttggtgtatctggaggaattgattcggcagtagttgctaatttaattaaaaaggcatttccagaaaactctatgggagttataatgagcataaaaagtaatcctcaagatagagaagatgcacttaaggttatagagggatgtgatatagaataccttgatttagaccttatagaaccacaaagtgctatattagacatggtagtaggaaatttaaaagataaacatttatatagagcagaatatttaaagatgacagatgcgaacttaagagcaagagtaagaatgagtacaatttatacaattgctaacaatctaggatatttagttgttggtacagacaatgctgcagaaatacacacaggatattttactaaatttggtgatggtggagttgatattttacctattgcaaatttaactaaaggagaagtatatgaatgggcaaaagagcttggtgttcatgaagatttaataaacaaagctccttcagcaggtctttgggaaggtcaaacagatgaagatgaaatgggaactacttacaatatgatagatgctgtgttagaaggtagattggatgaagttcctaaaagagaccaagagataatagaaagacttcatagattaagtgaacacaagagaaaaacgcctgcacaacctcctaagttctaatttactatttataagatttgtgataaaatttacaagtgatgaaaattagaataattaattgtacgtattaaggagtggaaatatgggacgtataggtaatataattaatagaaaaggtaaacaagatgctcaaagagcaaagatatttactaaacatgctagagcaatagcagttgcagctaaagaaggtggagcagacccagagtacaatgcagcgttaaaaacagctatagaaaaagctaaggcagataatatgccaaatgataatatagatagagctatcgctaaaggtgctggagcaggcgctggagaagactatgaaactatagtttatgaaggatatggacctggtggagttgctgttatagtagaaactttaactgacaacaaaaacagaactgctggtaacgtaagatactattttgacaaaaacggaggaaacttaggaactagtggatgtgtgtcttttatgtttgataaaaaaggacaaatattagttggtttaggagatggagtttcagaagaagaattgatggatgttgcattagaagcaggagctgaagatttcataacagaagaagatggttatgaaataataactacaccagaagatttttctagtgttcgtgatgagttaaaagctaaaggatatgagtttatatctgctgatgtgaagatgatacctcaaactacgactgtattgactgaagaatctcatttaaaaatgatgaataaattagttgatatgcttgaagaagatgatgatgttcaagatatatatcataactgggaagtagaataaatagtataagcatattgaaatttataagcattgaatcaattttaacatgtgataaattttatagaataagaaattactaaaatagacatacgcacctctaacctatatttgcataataatatgtaagtataggtaaggggtgtttttatatttataggttaagaaatttaaagtaaattttgagctggacttgattgtctataaataattgatgggtatataacttgttgctgaataccatttatacgcccagttactgtatcaataatcatcctaagactacgttctgctgtctcttccatttttaaatctataactgtcaaaggaggaatacttcttgccattagtcgtgaaggtccattacttgctgcaaatatttgaatatcctctccaattacaattccagattcatgaaatgcattcatcataccaagagctacaacatcatgattacaaaaaattactttttttagtgaattttttgcaagcattttttgagcaatatcatatccactatctattttattagaacaataatatatagaatctgatagatgtattccatgttctttacatgtttttaaaaaagatttaccccttaaagtcatacatgtaaaggaagttgggttgaatacaacagcaatatcatttttaccattttgaatagcatgtaaagctgctatacgaccagtttcctcattatcaatagatacacttgaaaaaccaggtatttcacgatttacaacaactacaggaattttaggtttattttttactagatattctatatcatcagcattgatacctgttaaaacaattccatcataataattatttgcaaaaaagtattcatcatcacatagatgaccaactttgtaaggtcgtatgatgatatttatgtttaaatgttctaaagaaattatgtggtttattgcttgaagtatattggttgatgccaactcaaatccctcatcctgccaataaaaagctattttaatattattatgtttaataggagtagagcgtttatatccaagcttatcagctgaatttaatataagctcttgtgtatgtagcggaatcctgcgttcatttcctttaccacttaagacgtacgagacagttgctgaagaaagaccacagtcttttgcaatatctttgattgttgccatgataaaatcctccttaaatagttgcttaaatttgcttataccaataatcttaacatatattcaactaaagaacaatattctacaaggtgcatattttacaggattagaataaataaatttaaaaaaacttcttacttatgttgacataatttagtttataggattataatatgcttaaataagcttattattaactcaaattaagcaaagttaagcaggaacatgcaatgctagcttgcaatgtgactgtaaagggggaaaaggtatgagtaaggtaaatatatttgaagttggtcctagagatggatttcaaaacctgaaagagtttttagaaactgataaaaagcttaagattattgatggtcttattgcttcagggattaaacaacttgaaattagttcatttgtaagcccaaaagcaatacctcagatgaaagatgcaaaagaagtagcaacttattgtgtagaaaaatatcctgatgtgaaactttatgcattagttccaaatttatatggtgctaaagttgcatgggagtgtggtataagagatatatcctatgttatatctttgagtgaaactcataataaaaaaaatataaatcgtacccatgaagagtctattgatgagcttaaaaaaataatgaatacttatccagacatgaatatatgtattggaatggctactgtatttgggtgtccttttgaaggtttaccaaaaattgaagatgccataagatttgctaaacgcctttgggaaaacggtatcagggagataaatctagcagatacaatagggattgctgaccctaagcaagtaagagaaactattagtgcattagttgaagctttaccagagtgcagatggcaggtacatattcatgatactagaaatatgggaatggttaatactcttgtggctattgaatctggaattactactgttcagtctacacttggaggattaggaggatgcccatttgctcctggagcatctggcaatactgcaactgaagatttagtatatatgcttgaacgtatggggtatgatacaggagttgattttgttaaacttcttgaattatcaaagtatcagaagagttttgtaaatggagtatatagtggtcatcatgtaaatataaagtctgatagttgtaattgttagttctattgattaatcgattaaaaaaatatgttgattaaaaaaatatgctgattggtaaaatagatttattgataaaaaagataaattataaaatacattatctaataaaacaaataaaaaaattgagggggattagtatggatattatagctttacttttatttttaggagttattattattgcatttgtacgtaagaataatgcaggtattttggctctagctattggtgtcatagctgttagaatttttggaatggatgataaagaactttatggagctataagcaactcaatgtttactacacttgttggtataacactactctttgcaatagtgaactcaacaggagcattaaagcttgttgcagaaaaaattgtagctgcttctggtaaacgtgtttggcttatacctatagcagtttttatagcaggatttgttgttgctggtgttggacctggggcaattccagcacttgcaattatcccagcaatggctgttcctgtagccataacggttggttataatcctgtaatgcttgcacttataggtgaatgtggattaatggcaggtcgtatgactcctattactccagaaggtcaaattataacaaccgttgcagaaggggttggaattgaaaatgttatgcctactatcttagcctgtcaaactctttctacaattgtattttcaatagtattgtttataattttcaaaggatataaacttaaaaaacctataaatgttatagatagtaagcaaatagaaaaatttaatataaagcagataatttctctaataagcatagtagttatgattgcttttatcataatttttgatatgaatgttgggcttgcagcttttgcagtttcagctgtacttatttttttcaatattgctgatgaaggagaatgtatcaaatcaattccatggagcacgatagtaatggttcttggagtaggtgcaatgatgacaatcgtagatgcagcaggaggtattgacttgatgagtaatgcattatcatcactgatgaatagtaaaacagctactccaattatgagtatttcagcaggacttatgtctatggttagttctgctttagcagtagtttatccaactatgatgcctatgtgtgttgatatagctaaggcagttggaggagtagacccactagcacttattgctgcagtcggtgttggaggttctcttgctggtgtaagcccactttctactggtggggcattgattttagcagctatgggttcaagtaagaaagactttaataaggaagaacaaaataaggtttttgtacagcttttcattatgagtgcagttggcttattggttattgcagtagtatcaatattatcatttaatgcaataacacatttaatgaactaattataataactgaaaataattcattaaatttaatttttaatattaatcaatataatataatttggaggggaagttatgaaaaaaggagcattaagcaatataaaggtacttgaccttacaagagttcttgcaggtccatattgtacaatgatgttggcggattttggagctgatgttataaaaatagagatgccaagaaaaggtgatgatacaagaggttttggaccttttgtaaatggagagagtttatactatgcaaatataaatagaaataaaaaaggtatcactctaaaccttaaatcagaagaaggaaaaaatatatttttagaaatggtaaaacatgctgatgttgtagtagaaaattacagaccaggtgtaatggaaaagttaggtctgggttatgatgagttggctaaagttaacaatcaaataatttatggagctgtatcaggatttggatgttatggaccatattcagaacgtccaggttatgatattattgcacaggcaatgggtggtcttatgagtataacagggcaagaaggaggagaaccaacgagagttggtaatgctatgggtgatgtactaggtggaatgaatttaactattggtatactcacagcactcaacgctagaaaaataataggaaaaggacaaagagtagatgtttccctcgttgattctgttgtatcgtctctcgaaactggtatacagagatactttgattcaggacaacctgaacttatgggtaatagatatgcttcagcctatccttatgactcttttaaggcaagtgatggaagttttgtaataggctgtggtaatgacaaactttttgaaaagttatgtaaaaaagttctttttagagaagaccttttaatagatgagagatttaaaacaaatcttaagcgttgtgaacattacaaggctcttaaaccagaaatagaaaaatggtctgttaagcatacaataaaagaagcagttgacttaatatcagaggctggagttcctgctgctcctatctataatcttgattgtgttacaacagatgaacatatagcaaaagcaagagaaatgattgtagatattagtcatcctattataggaaatatgaaagtcaatggaaatccagttaagttgatgacaacaaaagctaaaattgatatgccagcaccatctctaggggaaagtaacgaggagatttataatggttggcttggttttgatagtgataaaataaaagatttaaaagaaaatggagttatttgattaaaaaatagctaaacacacttgtgactttagtcatgggaggttcagttagaataatatcaaaaaatattaaatcaatactgtaaatcaaatatagaattgtcagaagcatttaagatgggaaaagctacttagacattgagtctttgtggcttttcctattttcattaagaactttatattatcagaatagatatgtactaaactaaagtattaacaatttaaattaatagaaaataaactacctaattatgttgaataaagactactttagtgaaaataaacttatagagatgctatttaaattattttaatggaaatatcaaaaatgagactgcattctcaaaaatgagactgcgttttttaagtattttctcgaaaatgagacaaaaatattgttttatgagttttattgaagaaaaattcttctgtgaattacaatttaatcaattttaaagttgaaaattattaaaaatttagtgaaatttatgtatatttcgtttattttattaaaaataacaattttttactaaaaataaagaacttcaatggtgattggcatagtacttgctattttatattaacaagaaatgtagaaaaaataacaatgtataatggggggaatatgatggaatctgtaatggaaaatttgaacaatcttaaggtggaggttaaggacaaagtctgtgttattactataaatagacctaaagctttaaatgctcttaatagtgacactcttagggaactatcacaagttattgatgtagtatcagaaaatgaggcaatattaggagttattattactggagaaggtaaagtttttgtagccggtgctgatatacgccagatgcaaaactataaaagtgaggaaggcagaaaatatgcaggttatgctcagggaatttttgataaaattgaagctcttgagaaaacagtaatagcagcagttaatggatatgcattaggtggtggatgtgaacttgctatgagttgtgatattagaattgcatcagaaaaggctatatttggacaacctgaagttaatttaggagttattccatgttttggtggaactcaaagattatcaagacttgttggaactggaatagctaaagagttaatttttacggggagacaagtaaatgcagaagaagctaaatctattgggcttattaataaagtggttccaagtgatttacttttagaagagtctatgaagatgatgaaccaaatagttgaaaaagcgccaatagcaataagatatgcaaaagttgttattaacaaagggatagatatggatttaaagaatgctcttgaactagagaaagatattgcaggtttaacttttgctacaagagataagcaagaaggaatgaatgcatttatagaaaagagaaagccagtttttgaaaataagtagctattataactaaattggaacaatgtagaatatattcaaaatctaaatttcgtgaaaaaatacatatagtttaattttaaaaggagttaatttatgaatacgggagtaattataagtttagtagggattatcatagctctatctcttctagttgtaatggttatgaagggaataaatatttttattatagcaattgtatgttcatcattagttgctataacaggaagcctaaatgtgtatgatgcacttaaagtggattatatgacaggatttgttggatttcttcaggcaaatttctttattttcctaacagggacattaatgggaaaaataatggagattactggtggagcaaaatctattgctaagatgattgtaagatggattggtaaggataaagcactactttctattccaatagcttgtggaatattagcctatggtggagtaagtgttttcgttgtaagttttgcagtgtttccgatagctttagaaatttttaaagaagctgatttgccacgaagatttataccagcagctttgacttttggatgctcaacttttgctatggttgcaccaggggcaccacaaattcagaatattgttccagcatcaacattagggacagatattatggccggagcagtaaatggttttatatcatgtgcagtaatgtttatagttggaagtaccattttgtacaaaatggtttcaaaagaaaaagccaatggtggtcattttatagcacatgaatcagatatatttgatgaagcagaagcaactaattctaagagagaaaatggtcctaatggtgtaattgccttaattccattgatagtgtcaattttaataattaatgtaaaagttaatggaaaagcgatagtaccaattgaggtgggagtatttattggagctttattagtatatttattgttaaataaatatcaagataatactaaaatagttggacatgttggtgatgcatgtaaaactacagtagtagcaatatgtaatacttgtgctgtagttgcatttggttcagtagtaaaatcagcagttggttttgacttcatagttaatgccatgactaatattcctggtcctcctattgcaggggctgcagttggaactacagttattgcaggtatttgtgggtcagcttcaggtggactaggaattgcagctccacttcttggaccagtatttttagccaagggtgtttccgctgcagcattaactaggactatggcaatttcatcagcagcattagattcacttccacacaatggatatattgttactgtaacaaatggtctgtgtaaagaaacacataaggatgcctatatgccaatattctgggtaactgttttaactccgtttattggaaccatagtagcagtcctactgtttacaatgttcccgggattgccataagagaaaagataaaaggtataaattatattttgatattataaaatcaattttcaaaatatatacaataaatttcatgttttaatactataaatatgtatttaaaataacaaattgaccatataaggaggaattgaaagtgttaaataaaccattagagggagttaaggttattgacctaacgtattttgtagcaggtccagggacttctaaaatattagctgattggggtgctgacgttattaaggtagagccaagctttggagacccaggaagaaagacaggggcaacaatgacaatgccaatagatgattataataatcctttttacagcacatataattcaaataaaagaggtttgtctataaatcttaagagtgaaactggaattgaaattatggataagcttttaagtgaagcaaacgtatttgtttcaagttatagaacaggagcattaaaaagactaggtcttgattatgaatcattaagtaaaaagcatccacaccttatctggggtcagataaatggttttggcgattttggacctgctaaggataatgcaggatttgatacagttgccttttgggcaagaagtggggctatgcttgatatagcagaaaaagatacaagtccaataaatccacctatagcctttggagatgcaacaacttcttgtagtttatctggaggaatatgtgcagctttgtaccagcaagctaagactggaaaaggacaaaaagtaatggcatctttatttgggcaagcaatatggaatgcatcatctttattagcatctacacagtttagtgatgagtatccaaaaactagaaaaaatgctatttcaccagtaataaattcttatcgttgtaaggatggaaagtggatattcttaagtattttagagcatgaaagatattttgaggcactttgtagattatttggaagagaagacttaataaaagaagagaaatttgcatcttcagtagaaagtaagaaaaatgctacagaacttattaatattttggatggtgaatttgcaaagtttactcaaaatgagatggttgaaaaacttactgctgctgatatagctcatgaaaaaattcaacatgttaatgatgtagtgactgatgaacaggctattgctaataactatatatatgagcatacaagtaaaaatggaaataagacaatgcttgcatccactccagttaaatttggaaatattgaagttaacatgacttgtgatgctccacttataggagaacattcagatgagatattgagagaacttggatacagtgattctgatatagaagctctaattgaatctggaattgtaacaatgaataaagaagcatgtgaaatatgttaataaacatgtgaagtatgttaataaataggagggaattttatggattttagattaacagaagcacaattaatgcttcaaagagtagcaaaagaatttgcagagaatgaaatagcaccaatagctgctgaaacagataaaacaggtatttttccaagggagctttttagcaaaatggctaaaataggatttaatggcattggaacacctgtagagtatagtggttctggagggacagatatagaaaaggtaattgttgttactgagattgccaaaaaatgtgcagcatctgcagcaatattatcaatacacacaatatatgctcaagctattttgaaatttggtactgaggaacaaaagaaaaaataccttccaatgatggctgaaggtgggtgtgtaggtgctttcgccttaactgaacctaatgctggttcagatgctgcaagagctgcaacaactgcaattattgatgaagaaacggatgaatatgttttaaatggaactaagtgttttatttctggtggaggtcaagcagaatcattaataatatttgcactgacagacccatcaaagggaataaagggaatgtctgctatcattgtcgacaaaggtactccaggtttttcaataggaaaaattgaagaaaaaatgggtattcatggttcagaaactgcagagttaatatttgataactgtagagttccaaagtctaacttattaggaaaagaaggcaaaggatttaatatagctatgacttgtttagatggagcaagaattggaattggagctcaagctgtaggaattgctgaaggggctttagaagaaagtatcaaatattctaaagaaagagtccagtttggcaagccaatttcagcgttgcaaggtattcaatggtatatagcagatatggcgacaatggtggaatcagcaaaattattagtatattatgctgcagatttgaaagctagaggagaaaaacacactaaagaagctgctatggcaaaatacaatgcgtcaagtactgcaagagaggttacaaatctagcccttcaaatccatggtggatatggatatatgaaggattatccattagagagaatgtacagagatgccaaaataacagaaatttacgaaggtacttcagaaatacacaaagttgttatttcaagagcagtactaggataggaggaaaagaatgaatatagttgtttgcttaaagcaagtttcagatactaatgaagttaaaataaataaagagacaggtactctaataagagatggtgtaccaagtataatcaatccagatgatagaaatgctttagaagaagctctaaaaatgaaagatgaactaggagcagtgattaaggttataagcatgggacctcctcaagctaaaagtgctttaaaagaagctttggcaatgggagctgatgaagcttatttaatctcagatagagcttttggtggttcagatacttgggctacatctacaattattgctgctgctatagaaaaggttggaaagtatgatgtaatattctgcggaagacaagctatagatggagatacagctcaggttggaccagaggttgcagaatttttagggataccacaagttacttatgcaaaagaagtaaaggttcaagatgacaaattactagtaactcgttatacagagacaggggattatttaatagaagcaaagatgccagttttattaactgctataaaagagttaaacaatccaagatatccaagtgtaaaaggaatcttagaagcttataataatggagatgcgaagattactgtattaacacttgcagatttagatgttgatacaactcaaattggattaaagggttcacctacaaatgtttataagtcttttgcaccagttaaagacaagcataatgaaataatagaaggtataaataaaaaagaaaaagctgagaaactaatagaaatactattcgatttgaaactagtataggagtgttaagatgatgagagcaaaagttaatcaaggtataaatttaaatgattataatggtgtttgggtaataggggagcaaagggaaggcaaaattaatcctgttacgatagaacttattggtgaaggaagaaagcttgctgaccaattaggaaaagagcttgaagttgtgatagctggatatgaagtagagaaagaagtgaaggaattacttcactatagtgttgataaagtatattacatcaatgaccctcttcttaaagatttcactactgatggatatgcaatttcaattgcaaatttaatcgaaagaaaaaagccagaggttgtattggttggtgctacttctataggaagagatatagcgcctagaattgcaggtaaggttggaacaggtctaactgctgactgtacaaaacttgaaatagattcaacagataataagttattacaaacaagaccagcatttggtggaaatttaatggccactattgtttgtccaaaaaatagaccacagatgtcaacagttcgtccaggagttatggcaaaagctgtaagaaacgaatcagagactggaattttagaagttgttactccagaacttactgaaaaaatgattagaactagattagtagaggtacttccacaagaaaagaaatctgtaaatctaactgatgctagaataatagtatcaggaggaagaggattaaaaagagcagaaggatttgagcttataaaagaattggctgataaattgggggcagagattggtgcttcaagagcagcagtagattcagggtggatagaacattctcatcaagtgggacaaacaggaactactgttagaccagaactatacattgcatgtggaatatctggagcaatacaacacttagcaggtatgagtgattctaaatatatagttgctataaataaagatgcaaaagcccctatttttagtatatgtgactatggaatagtaggagatttatatgaaattatacctgaaatgatagaatcattaaataggtaacttttagaaaacattgaatatgtagaatgataagtcttataatattgtattgtaagacttattatttttgctgaaggttatagtggggagatgaaacaatgaaagagcagtggtataaggatatatttgcaagaatattatctatgactgatgatggttttattgttgtaaatacaagtggagtaataatagatattaatgataaatattgtgactttttaggaaaagaaagaaaagatataataggacaaaatatacaaagtattataccaaatacaaaaatgctagatgttatgaaagataagtactgtgaagaaggagctatacatcattattcaggtggaaatacaaaagaaaaaagtgtaatagtaagtaggtcttatgtagaaaatgacaatggagaagtagttgcaggagtagctcaagttaaatttagattgcaatcatttgatgtagctaaaaaattaatgtcagaatatatggagctccaatattataaagagcagtttaaggataactgcggttttgacaagctcataggtgaaaatagagacttcatagaacttaagaaaacaggtgtgaaagcttctaaaacaaactttccagtacttttaacgggtgaaacaggcacaggtaaagaagtctttgctagagcaattcacaataatagcagtaggtcagataaacctatggttagtataaactgcgctgcaataccagaagaattattagagtcagagctatttggttatgacgaaggagcttttacaggagcaaaaaagggtggtaaaaaaggtaagtttttagttgcaaataatggtacaatctttttagacgagataggtgacatgcctttgaccatgcaagcaaaacttttaagggttcttcaggaaagtgagatagaaccagtgggaggtcttaaaactataaagatagatgtaagagtaatctctgccacaagaaagaatttaagtaaaatggttgaagagggattatttagagaagacctatactatagattaaatgtaataaacattcatatgatggaattgaaggacaggcaagatgatattttattgctagcaaattatatattaaacaaattaaatgttgaatacaaggaattgaaggttttaagtgataaggttaaaaattgttttattaactatacttggccgggaaatataagagaactacaaaatgtaataaaaagtgcctatgctgtaagtgatgatatggtcattatgatgtgtgaccttccatctaagatggataatatcagcagagtagctcaatgtaatgtggatagcaattgttcaattcatgaaatggttgagaattatgaaaaaagcttaattattgatgtgttaaggaagtataattggaaatgttctaaggcagcagaggttatgggaatacacaagagtcttttatataagaaaataaaaaagtatgaaattgaattaaataattaagataacttgaattaaggcaatgctaaaaaaagcgcccttattcaaagcgaactgtataaactgttttatgcagttaaaacgtgtaaaagtagatgtgaagtactaatgtcaatcattagtactttttattgtatttataattactatctatatttcagtatcttttgatatctaagattattatgtttaatttaggatataacaaaaccctcttagttattgacagttttttatattttaactgtctactaagaggggatagtttagtttaaatttagagtaaattttatctagcatttataaaaaatattttgaatagcttttttgttatttagtcataattttctacttctttatcaagttctttgccacaagaatcacacttatatatagcattgtatccataatcatattcatcaactattttcttttgtctaaatacaccaccacactcacataggaaaccaatttttataagtgtaacgataaattgtgattttataaattttatatcattacatttatcgttagtgtaaaatgtataaatataagagttatcgcactcatctcttaattcaaatctttcaatatatgtgttattttttaattcctcaaattcttctttagttaaatatgatttttgttgcaattcatgtaaacgcttaatttggtccattatttatatcctcccaataattttagtattttaagcttagataaggaatctaagttttattaaatttatcccaaggaattatttaaatcatatttagttttattaattacaacatatataaattacacgaaaataaaactaattgtaaaaataatatcctgtgaaaacctaaactactaaccccttactaacccgaaaactaaaaaaagaaaatatatccaaatataagtgatatataaataaagatgttttatataaatttaactttaaatattctgacaataatatatataaatatattatagttaaaatataccacatattttgggcattgtatactggaattagagtaattaatttattttttaacatacaaatgattttatgaaaaaaaacaagactcaaaaatttttatattctttgatagaataaaattgagagtaaatttattgaattttataaaatttataaggggtgagtctaagatatgcatgaagataaaaatgatatatttgaatcaatagatactgaggattttgataataaaacagaagaagaatgtttagagctagtaagaaaaaatggattgaatttaatatacataaaaaatcaaacagaagagatatgtctagaggctgttagacaaaattgtaatgcaataaaatgtgttcagaatcagacagaaaaaatatgtatagaagcagttaaacaagattggagaatgttagaatttgtggaagagtcaacagaagaaatttgcatgttggctattaaccaagatggaacagcattaaaatatatagaaaatcagacagaggagttatgcttaagagccgttgaaaaaaatggtgcggctttggagtatgtaaaagaacaaacagaagaaatatgtatagaagcagttagaaacagcgaatttggattggcaagagtgaaaaatcaaacagaaaaaatatgtatggaagcagttaagcattgtagctataatctaaaatgggtagaaaatcaaacagaagaaatatgtatggaagcagtgagacaaaatgggcttgatttgaaatttgtaaaaaatcaaacagaaacaatctgtttaagagcagtaagacaaaatggaatggcattagaatttgtaaaggaacagactgttggtatatgcttaaaggcagtaagacaatatggaatggcattaaaatttgtaaaagaacaaacagaagaaatttgtacagaagctataaaacaagataaaagagcacttagttttgtaaaaggagataaggaaaaatacaaggctctatatgataataatgaaccatttgcaaagagatatgttagaaatgtaatagaaaaagaaaacagagcattgattaaaaaaggagaagaaaatgcaaaaatcaaaattgcaggaaaactttatgatagaggcatgtcttttgaagatatatcagatatagttgagattgaaataagcaagttaaaagtgagtttaggtgttttttaaagtaataaatgtaggtgttttttatgggaaatagttaataaaaaaataatcgactagctctttgtaggacagcaaaattagtgatataatttgatgtataataaattatttttattagataagggggaattaaagttgaagattacagtattataccaaacaagaagtggaaacacagaaagggtcgctaagctgatagaagatggagctaaaaaggtggatggagtagatgtaaagcttatgagacttgataatattgatttagattatttaaatgaaagtaaagcagtaatatttggaacacctacttatttagcaaatacaacttgggaagtaaaaaaatggtttgatgaagattcaaaaaaagttaatttagctggaaaattaggagctgtttttgctacatgtgattatatatgtggaggtccagatgttgcgatacttactatagtaggacatttgatggttaaagggatgcttgtgtattctggaggtggttctttaggaaagccatttatacatttaggacatgtacattcaattgaaggtccagagttacaagatgagaaggctataatatttggtgaaagaattgctactaaggcaaaagaactatttgcttaatttctatatgcataataatgattagagtaaatttagggttttaatggagatttgaagtaaaagttataaaataaaaaattttccataaaattactcaagatgaattataatataattataaataaattatattattaaaatatttaaaatcaaacgtcaatagcgagggaagtttatggtatggcatatagaatatgagattttttctgcaattatagttatttttttaatggtatacttttttagaagtaaatttatacctactttacaaaacaaaatatattgtgcacttttaatattctcatttttatttatactttcaaatattttaggttcattttgtctaaataatatagacaaaattccaatttttattacttttttattgaatcagatatacttattgttattgccaataccagcagctcttgtatcattttatgttatggctattatttatcaagatataaggtatatgaaaaaaagattattatttttatctataccacttataatttgtataatcttatctattacaaatccttttacgcatattctatttggattgtcaaaagaaacaggttatatacggggttgtggatatgttgcaacttttgcatcttttttcttttatgcaatatattcagcatttttatcttttaaatatagaaaagcaatgcatgaatcaaaaatatgggctattagaggttttcttatagtttcaattgtggcaattatcttacaggcaatttttttacagtatcttcttacaggaactgcatgtgcatgtagtttacttttgacatatctttctatgcagaatcgaggtcttattattgatgaccttactggtgtactcaatagacaatcttttattcaagagctagatttgaatatcaatactgaacaatcaggatttattattacaattgcgcttgatgattttaagtttatgaatgaaacttttggaacaaaaaatggagatattgcactaaaagaagttggaaaatatttgattcagatacatgatgtaaaccatgtatatagaatagggggagatatattttctattgttgtcaatagtcaattaggtatagaaccagatgatattatcagaaagatagaagaaagatttaaaaagccttggctagtagaagagataagttttaatttagcaactagtattgctgttgtttattacccagaaaatgcagaaacgacagaagatgtaattgttgctatagatttctctatacatgaagcaaaacgttctgagtcaaggcgagttgtttatgcagatgcgtctataagtgaaaagataaagaagaaacatgttattaaaaattgtttaaaagaagcattaaaaaatgatgggtttgaagtgtactaccaacctatattttctaatagcaggggcaggtttacttcagcagaggcattacttaggctagaacacaaagagttaggttttatacctcctgatgaatttattccaattgcagaacaaacaggattgattaactcaattggattagtagtctttgagaaggtatgtagatttatagctagtgatgagtttgaaaatttaaaattggataatatagctgtgaatctttctgtagtacaatgtatgcaaaaaaacttagctgatgatttactttatcttatgaataaatataatgtatcaccaactaaatttaaacttgaaattactgagactgtggctatgggctcttttaatataattaaagaaacaatggaaagattaattgatttaggtgttaagtttgcacttgatgattttggaattgcttattctggagttactaatatgctttctttaccattttcagtaattaagttagataagagtttgatttggtctatgaatgaagatagtaggcataagcttacagttgagacgattatagctcttataaataaattgaatatgaaggctgtagcagaaggtgttgaaaccattaagtgtgctgaagatttaatagctatggagtgtgaatatttgcaagggtattatttttctaaaccagttccagaagatgtttttaaaaatttgttgaaagaaaatacttttacaagttaacaccctttatttttttaattacaactttgttcattgacactgccagcgatatattataaaattaacacaataataaatattaaatttattatacatattattaatattaattaatggagtaaagatttattatattttatttaattatcctaaagtgagaaaggaagatgtgacatgaataaaaagaaaatattagtgccaattgatgggacagaaagaagtatgcattctttggaatttataaaaggaatatttaaaaaagatgaagttgaagtagaaataatgaatgtaaaagaactagtatttattgatggcatatccctggctgaagagataaaaaattctgaaaatttaggaagaagaatcttggataaagcagcagagataatgggagagtatgatgttaaagtacattttacttttggatatccaggagatgagataattagaaaagcaaaagaagataatgtagattttatagttatgacaaaatctactaaaaaaggtcttacaagaatgataggttcagtaacagcaagtgtagttaaacaagcaaaatgtatagtgatgattgtaccggagtagaattagaaaggtatttgaaatatgaataaaaagatagtagcagtttgtgaaagtgaaagaagtttaaattctcttaagacagctgcaaatgatttaggatttgatttagtttatgaaattcaagaaaatgataatataaaaaatgaactttctatttatgatatagaagatgcatctatagtgttatttgttacaagtgattctatagaaagcatagagaagattgatagatttatagatagagaattttatgaagttgatccaaagtatataatagaggatgcaaaatctatagtaagtgaaattttaatagacttaaattaatcgtgggtgtcgcactaagaatagagcgacgcctttttacatattttacataagaaataaagggctgtctcaaactatagataagactctttttcattgttgaaatgatgaaaatatatttgatttcatacaaaaaagagtgcctcataactaaaaagttcactttgagacactccatttttatatgttagttgcatttaaggtaaaatagaagtttaatcatgttgaaataactgaattacatcttctaaatgattgtacattgatgtataacctaagtaagagtctttactatcaaatgccatcattatcttgttatggtggctaatcatatccttaagagaatttctatatttaaaaccgaagtattggttagaagaaactgttttaggtattaactcataatattttataaaaattggattatgagaagctaaaattatctctttgtgaaattgtaagtcagcatcataacattcttctatcaaaccatgagaaaccttatccaattcctctattgactttaggtaagtatattttattttttgaagttctttagatgtagcatttaaaattgctagtttagtagcttcactttcgataagttgtcttgctcttaaagattctacataaaattcttgtatgttatgatttttatagatttcaccatcatcaaataggtcaacttttttaaatccttcaactataggacttgagtaaggcacagctctaagtattccttccttacagagtatatttatggcatttcttacaggtattctacttatgttaaataggtcagcaatctttctctcacttggtaatttactattaattttaaaagttccatttagaatgtttaatttaatataatcaataattttttcagtggcatttaagcttttcataaaaactcctaaacatataatttttttatgattgtattatatcatagttaagagttaaatctacttttttataatatgtataagacaggatagaggccaaaatagctataatagccaagataaagtatccatattgtattgaagtatattccgatattttaccaactatcattggaaatacagacattcctatagcataaattgcttgaaaaaaacccattgcagtagatttctgatgttttggtacatttttcatagactcgctagtaaggtaagaaaggagtatacctgtagatatacctggtagcacttgtagtacaaatattatattaatattttttattgttggaactaaaaagcaataggctgaaactaaaataaaaactaaaggaatccaaaattttggcccatacttagtacaaaatttagtagaagcaaagccagaagaagcaacagcacacaccatgtaagatatagaagatagacctatgagggtagaactagaacctaagtttttaagaatttgagtagtaaatgacattgttgtagacatttgaataccctgttgaattaatgccataaaggaaaaaaatacaagtcttttatctttgcagatagataaatattttttaattgatattttttcaggtattttttttgaattatgattttttatatttaaggctagaatcgttccaataactgaagacaatacactcatgatacataaggctgtcattcctaatttttcataaaataaagtactcataacaaatccaatcaacattcctagattgtttaccaatattatcgtactcgtagctttttgttgatgttctgtagaaaaaaagttggtatagtgaaccatgtaagaaatccaagttgatgatgatattccagataaaatgttagctataagaaaaccattgcctccaggagaaaagactcttataagagatgctaaaccagcaaagaaaattccagacagtataaatattttatgtttatttatagaatcagcaaatactccaacaggaatccttaataaacattgtgagattccatatgcacctattattataccaatcatatttgtagatacattacatgcacttaaatatggattttggaaaggtatatatacatattgtgaaaaccagaaaaatgtaacaatagaaagtaaaagtaatttttgattagatatttttttcatattatcctccatatggtatttttataatgcaaataatataccatttagattttttaatcaagtactttctctattaaaaaaaatttaaatatataattattatttacaaaaaaattatactttatagttgaattaagaaaacgcttatgatactataaagttaacaaatttgaatatataacagtagacgtgttactggtaatgcaggcaagatcgaatcaatttttatagattatctatagagtactatgggtataatctatttatttggttcgatttttttgtttaattggccataaaacaaaaagcctatagttgaaaatggaggattttttatggattataaaaatatagctcaagaaattctactaaatgtaggaggaaaagagaatgtaaatgaagtgactcattgtatgacaagacttagatttaaagtcaaaagcgcttctaaagtgaataaggataaattatctaaaactgaaggagtaataactgttgttgagagtatgggtcaaatacaagttgtaattggaaataaagtaaaaacagtatatgatgaggttataaaaattgtacctcaatcaaatgacgtaggtaaaaagaatgaaagtcaagaaaagcaaagtataattaattctatattatcagcagtagctggtatatttacacctacaatacctgctatagcaggggttggtatgattaaaggtattttatcagttcttgctatgtattatatgaataaaaatggagtagatataaaagaaacgcaaagttatattatcttaaatgccatggccgattctatattctattttatgcctattatactaggatatactgcggctaaagtatttaatgcaaataaaataatatctatggtattaggagctacactttgttatccaacttttactgctttgatggcaggtgaagaatctgttagatttttaggattggcagtaacaaaagctacgtatacatcatctgttattccaataattattgctatatgggctctttcatacgttgaaaaagtattagaaaagtatatacctgaggtaattaaaataataatggttccaactttatcattggttgtaatgttacctgcaacattatttttatttggaccaatcggaatttatataggaaatgtcataaacttttcttataagtatatttatgaattaagcccagcgttgtgtggagcatttgtaggtgggttatggtgtgtgttggttatatttggtgctcatagagcattattaccaataggtataagtgatgttgctcaaacaggaagacagaatttattggcatttgcaggagctgcaaacttttcacaagcaggggctgctctaggagtattctttaaaactaaaaatcaaggactaaaaacaatttctatgtctgcaactataacagctttatttggtataactgaacctgcaatatacggtgccaatcttagattaaaaaaacctatggtatgtgccgtaatatgtggtgcatttggaggtgcgataatgggaatgggtggagcttatggtaatgcatttgcaaaccaaggtgttttaactatacctgtatatgctgaagcaggtgcattaggtttcttaagttatctaggtggttgtgctatagcattttttggttcagctatttcaacttatctagttggatttgaagatttggaagagtcttctaataaggaaaattcatttataaaagtagaaacgaaggatggtgttattgatataacttcacctgtagagggcgaatgtatagaattgtcagaagtaaaggatgatgtatttgcttcaaaagctatgggagaaggtatagctgtgttacctacaaaaggagtaataacagcccctactgattgtgaagtagcttctttatttccaacattacatgcaataggattaaaattagataatggagcagaaatgttaatacatgttggaatcaatacagtagagttaaatggtaaatactttacaaaacatgttaatcaaggagatttagtgaaaaaaggtgataaacttatatcgtttgatatagataaaataaaaaaggctggttatgatgtaactacgccagttatagtaaacaatacatttgattttgggcaagtagtttcttgtaaatctagttatgtttcaaccaatgataatataatttcattagtattagctggtaattaagttaatttgactagagataagtaaattgatttaaaaggaaataagtaaatcaacaattaaatacatctaaaagtaagtttattgcaatgaattgttaaagaaaataattaatatggagtaaagctattgcaatgaagtaacaaagaaaataattaatatagagtaagtttattgtaatgaattgttaaagaaaataattaatatagggtaaatctatctcaatgaaataacaaagaaaagagttaatatagagtgaacttattgcaatgaatcaacaaaaaaaataatcaatataaaaaggagaaatatttatgaatacaggatttccaaaagactttttatggggagcatcatcttctgcatttcaagtggaaggagcttgggataaagacaataaaggaaaaaccgtagccgactataattcttttaaaaagtctcatttacaggcagatactaaagttgcatcagacttttaccataattatgaagaagatattgaattaatgaaagaattagggatgaaaacatatcgtttttcaatttcatgggcaaggataataccagatggtgaaggagagataaaccagaaaggtttagacttttataataagataatagacaaactaatagagtgtgatattgagccattcgtaactttataccattttgaccttccatttaaattagtagagaaatataatggttgggaaagtagagaaactgtctatgcttttgaaagatttgctaaaatatgctttaagcattttggagatagggtaaagtattggcaacctcataatgaacagaatttaattgttagagtggaggagagaattaatatatatgatgaaacagattcatggaagatagataaaatgcgtgctcagatggattataatctttgcttagcacatgcattagcagtcaatgcatgtcatgagatgataaaagaaagtaaaattggagcagcagtatcatcatctgtaacatatcctcttacttctaagccagaagatgtatatgcagctagaatgaatgataattttaaagtgtactatatgcttgatatgcatcattatggagaatatccagggtattatatgaagtatcttgaaaaaagaaatacagttcctcacatggaagatggggataaagagatacttaaaaaagctaaaatggattttatagctgtaaattattataggacaaattgtgcagaagctttacctgaagattcacaacatccatttggattaagagaaggaactgttgattttagtatgtatggactatttaaaatgtcaatgaatcctaacttagaggcttctgagtatggagcagcaatagacccatcaggtcttagagttgccttaaatgaatattggcaaagatatcacttacctgttataataacagaaaatggtctaggagctaaagatatattagaagatggaaaaattcatgatgactatcgtatagactatttaagaagtcatataaatgcatgtaaactagctattgaagatggtgtagagatgattggatattgtccatggtcatttacagaccttttaagttcttctcaaggttttaataagcgttatggacttgtttatataaatagaactgaccatgaagttttagatttaaaaagaatcaagaaagatagtttttactggtataaagaagttatagagaacaatggaatagtaaaataaacataaatatatattgagggttttagtatgtacattacaaaggtattaaataattcgttgctacttgcaaaggatgataatgatgaagaaataatattgatggggaaaggcattggccataattataaggccgggtctgagttaaataaaaaagatatagaaaagatttttgttcttcatgatgaaaatataaaaaagagtattatacaattggcaacagaaatagatgcagaatattttggtatagctcaaatgataattgcatatggaatagaaaaatataacttaaaacttatgaaccatatatatttggccttaactgaccacattgcctttgcagtgagacgctttaaagaaggtataatgattgaaaatcactatttgttcgaaatcaaggaatttaatccaaaagagtatgatataggaaaatatgctattactgtttttaaggaggttcttggtttagacctaccagaagaagagattggtaatatagcaggccattttataaatgcacaacaagataatccttatagtgatagaaataagagaagtgctaaaattgtaaatgctattttgcaaatagttcattatcacttttctattgtatataataaagagtcattttattataggagatttgtaatgcatctaaaggccttttcacaaagatttctggctaatgaaccatcaagagaaaaaatagattttatatatgagcaagttcaaaaaaattgtaaggaagagtatgaatgtgtgaaaaaggtaggagcttatatgtataaggaatactccagagaattaccaagacaagaggagttatatttgatgattcatattcataagattttaggagaattatgcgaaaatagttagaatatcttaatatgctagtaatattataaaaaattaaaaattaactacactttaaatatgaacaattgcattacttaagggggttgtcttaaaattgatttttttaattaaatttgaagctcaactccttttttaaacctttatatcattacaactttaatgtttatacgcctgtactttagatgtatatctactttttacatttctcaacatgcaaacctaccattttttgcagtatgttaattgaaataaaccattgagttaaccctaaatttattctggacttataggaatagttccaaagatactttaaaatattttctggaataattgcttatttcacatatgttttattgtgatgttttgatttaataaattcttcaactctgtatatagtaaatgtattatcatgtttgttttattcaagcacacttataatacgcttgattttttcacaatgatgaaatatactaatgggtgttataggtataagaatcgaattacacttgaagaagtaagtgataaatgagatataaatcctcatatgataaactactatttcattgaggaacatattctaagtgatgtcaagatactacaatatgactaaattcctagtgataaaaaagtctacgaatgagtgtagaaaggggaactaagatgaataaagttttaattatagatgatgataaagatctttgtattttgttaaaaaagagtatttcaattgaacagattgaagcaaactattgccattctgggagagatggactggttgaactttcaaaacaagattatcagttagtagttctagacgtgatgatgccaggtatggatggttttgaaactatggaacaaatacgaaaatatagcagtattcccatcttaatgctgacatcaaaaagcgataattacagcaaagtgcatggattgcgagctggtgcagatgactatctaaccaaaccatttgaaattacagaatttactgctcgtgtactgtctttaatccgacgttacacccgttttaatccaaaaaatgaggaaccacagcaactttctttcaaaggtttgttgattgaccttgaccagcatacagtgactaccaatggcgaacctatgttgcttccacccaaggaatttggtgtgcttctttactgtgcaaggcatcagggtaagattttgacaaaacagcagatttatgaagctgtgtggggtgagccatatgtatatgatgacagcaatatcatggctattatcagtcgcctaagaaaaaaaattgaactagacccatcatctcccatctatttgcaaacaataaaaggaattgggtatcaattcaacacggaggtatgaaaatggatgaacaaacgataattcttttcttattcttgctgtcgattggtctactttttctttccatatttgctttttccaagcttgggcatattcacaaacgcctaaaagatatagaggagatactggctgatgtacaaattggaaacgaaaatcgcaaaatactaattaagccatgtgatgttatggctccattggtttatcagcttaatgagattgtctacgattatgaaaataagttactttctctgaaaaagtcggataaagctagcaaacaacttatgacaagtctatctcatgatgttcgtacaccattaacaactctgattggttatctggatgctgtacacagtggtatagttatcggacaagaacgggaggaataccttgaaatcgctaggcgtagagcctacgacctcaaggattacattgatgttctttttgactggtttcggttgaactctgatgaatttacgctgtcaatagaatctgtggaaattgcagagttgtcacgcaatattttgaaagactggattcctatattccatgaaaagaaactgaattttgaaattgatattccagaaaatcgactaatggtaaatctcgacccagatggatattcccgtgtggttaataatctggttcaaaatgttcttgctcacagtaaggctcggcaaatcaagattaccatgagtgaggattccagaatggtattactccgtgttgatgatgatggtgttgggattgccagagaaaatttaccacatatttttgagcgactgtataagtgtgataaaggacgttcagaaaaaggaagtggtcttggtctatctattgtcagtcaaatggtggagcgaatgggtggtcagatttccgtagaaagtgagattggaaagtataccgtatttacagtgagcttaccattaatataaaattgtttttcccccatgtgacatgtatacacagggggattttttgtaagttataaagttgcaaggttaatacaaggttgttgcaaggttaatgtaagattgaggtggtatgatagctttaataaacaaaggaggattttattatttatgaataatttaattattgaaacaaaaaatctcactaagcaatatggtgctcaaaagagcgtttctaatttgaatattcacgttcagaaaggtcgcatttacggattgctaggaagaaacggtgcgggtaagacgacaactatgaaaatgttattgggtctaacaaaaccaactactggagaaattaaaatatttggtcaggacattcacaataacgagaagaagcttcttcctcgaattggatgtttgattgaatcaccagggttttatcctaatctgacaggaacagaaaatctcaaaatctttgcaaggcttagaggaataccaaaaaaaaatgcagtagaatcagcactggatgtagtcggtttgccaaacaatgacaaaaagttattttctcaatactctcttggtatgaaacagaggttggcgattgctcttgccattatgcatgacccacaactgttgattttggacgagcctatcaatggacttgatcctattggtattgcagaagtaagaaagtttattcgtgatctctgcacagaacgaggtaaaactattttgatttccagtcacattctttctgaaattgccttgttggcagatgacattggtattattgaccatggtattttgttggaggaagaaagtcttgcccaattagaagaaaaaaacagtaaatacatacattttgctgtatctgatgcagcacatgcagcaaggcttctggaaacccaacttaacctgaaaaatttcaaagtagcagataattacaatattatgctatatgatacagatgtttctgttgcagaaataaatcgtgctttcattctaaacaacattgaggtatcagaatctcatttatgcgaagatactcttgaagattacttcaagaaagtaacagggggtgaaggaattgcttgatataatttcatgtgaattttcaaaactcaagcggttaaaatttatactgatttctattttaggtgcttgcttatttccaattcccgcaacaattttgattgcaaaggacaacttgccctttgagcaattgttcaaattagttgtcaattttggatattttttgctattaccaattgtattaagtattgttgctagccaactattttttatagaaagagataacgatgtattaaaaaatcttgcaacagtgccagtgccaaaaggaaaactggctctggcaaaattggctgtgttgctgtttatatcattgttctactccgttgcagggttaggagctactatcattggaggtttcattgttggaatagtagagggggttactgtaaaattaggaatgagcattgcttttggaattatgttttttgttactgtacttcctgttgtggtactcattgtatatttcaatcgcagctatattttttctattatactttcttttgtatatgctattttcaattttagtatatccttaaatattatcaattttgaaccaaataacccactattaagcgtattacctgctcctgttataatgcgttggtggatggcattttggggagatcccactggcgaatacacggcacttagacagccatatttgctctcaactcctgcttgtgtaggtattttatgtttgataaccattatagcagtcctgctgatttgtatgatatacaaaaagcaggagaattaggaggtatctatgcttgatataattactacagaatttcaaaaaataaaaagatataatattctatggattggtgttgttgctgttctgttttcagcactattggcagtttttcaggttgtaagttcacacggcagtgaccctctaacgtatgagagctttgcaaacggagttatctggaataatttcagtcttagttttccatttgggattacacttattggaggatatcttattaaccgtgaatatacagaccaaaccttaaaaaacatcctaactgttcctatttcattacgcaaattgctagtgggaaaattaattgcggttggaggaattgctgtattgttaagtcttttcagcttcttatgcacatttattttggggttgttattttgcaatatcaatatatctgttacactcattgtaaaatccttagttcagattttgtctgttaatctgtattgttatgttgctgttttgccgattattgcttattttggtcgtaaacaaaatgcatttctgacgggtgtagggattgcatttgtatacgggttttgtggtgtgtttgttgctggaagaaatctgacagacttttatccaatcacagcaggtcttggtctagttggatacaacaatggtgctggtactgtttatcagccacttatcggtgctatgactttgattgtaattctaatcttgacaactattctacttgtatttacacctaattatgataaagttatgaccatatctaagaaaaaagggataaagcataaaaagtattctcataaataacataaatattgtttctattatttaagttgctagacagtgaaaagaaaaaatctgtcgtacagtggctatatgctcatgtattcaagaagctacagttttgatttttcataactgtagcttctttttgtatttattaaatcacggctatcataatacttgcaataggtatagcgacaagagagagtactgtcatgtgtgttttatatattacattaagtatattctaaaatatatgttttaaataatatatttgaaaataggaatatttaaataaaaaaaataatattatatatagttgacaaaaattggcaaatgatataatatataaatatagaaatagtaatcattactattattaaaaagggaggaattaattatgaacttaaaaggaactaaaacagaaaagaatttaatggcaggatttgcaggagagtcagaagcaagaaataaatatacatactacgcttcaaaagcaagaaaagaaggttataatcaaatagctgctatatttgaagaaactgctaacaatgaaaaggaacatgctaaattatggtttaaacttttacatgatggtatgccttcaacagaggaaaatttaaaggatgcagcagcaggtgaaaactatgaatggactgatatgtatgcaaaatttgctaaagaagctagagaagaaggatttgacaagatagcttatttatttgaagctgttggaaaaatagagaaagagcatgaagaaagatacttaaagcttttagaaaacttaaatgaaggaaaaatatttaaaagagatgaagaagttgtttggcaatgtcaaaactgtggtcatgtgtatgtaggtactgaagcaccagaaaaatgcccagtatgtgaccatccaaaagcgtatttcaatataaaagctgaaaattattaaaaattatcattattaaaaaggaatgttaactatgaaattttctaaacaacgagaactgattttaaatgaaatattaaataatccggttcatcctactgcggattacctatatgaaaacttaaaaaaagataatccaaatttaagcttaggaactgtttatagaaatttagctcagctaacggaacatggctttataagaaaggttagtattccagggtatccagatagatttgatggtcgaatagataatcactatcatatcatatgtgaagtatgtggagaggtatacgatttagaatccgaagttcttaataatttacaagaattaatatctgaggagacagacataaaaataacatcttataacataagttttaaagggatttgtaataattgtaaaaggtgtagccaagtaggttagttttcaaattctaaaaataattaatgaggtgagtttatgtgtagtgaacaaaaattttttatatgtgagacttgtggaaaccttgtaggaatgatacaaagtggtggtgtacctattttctgttgtggaaaacctatgaaggaacttgttcctaatacaacagatgcagcagttgaaaaacatgtacctgtaattgaagtggatggaaataatgttactgttaaagtaagtagcacaactcatccaatgactaaagaacatcatatagcatgggtgtatcttatgactgaacaaggtagtcaacgcaaatgtctagcagtagatggagaacctgtagttaaatttgctttgaatgatgatgataaagtgatttctgcctatgcttactgtaatttacatggattatggaaggctgaactgtaatatttaaataaattgagtcaaagaggaggctataaatgtattttcatacaaatagcctcctataaatttatataaattcaagttttaattttgtttaatgtcaatataatataaggagaaaataatatgtcaatttataaatgtagtgtttgtggatatatttatgatgaatctaagaatgataaaacatgggatgaattaagtgaagattgggaatgccctgtatgtacaaaaggtcgtagttattttggaaagataagcactgtttactatgaagaagatgaaaagatagcagaagacatagttgaaaatgaatctaaattaaatactgaaaaagagggagatttaaattacttaagtacatatttaagaagagatgatgaagttgagaaacatatggatataattcacgaaatggctgttacaggaaaatctataatagaacctatgagaactaaactaccagtaatttcttgggatgatattttaattatgggtgctcaattaaatccattacctttaaatgagcatgatgaagtaaatacaacaacaataataggaaaaaaagcaaagaaacctatgattatagaaaatccagtttatatttcccacatgtcatttggagctttgtctaaagaactaaaaatagctttagcaaagggtgcagcccaaaataagacagctatgtgtagtggtgaaggaggtatattaccagaagagaaggaagcttcatacaagtatatttttgagtatgtaccaaataaatatagtgtaactgaagaaaatcttaaaaattctgatgctatagagataaaaattggtcaaggaacaaaacctggtatgggaggtcatcttcctggcgaaaaagtaactgaagaaatagcaaaagtaagaaataagcctgtaggtcaagatgtaataagtccatcttgttttgaggaaatacaatccaaagaggatttaaagaaacttatagatgaacttagagaagtttcagaagggcgtccaataggtgttaaaatttcagcaggtcatattgaaaaagatatggaatttatagcttatgctaaacctgattttgtaactattgatggtcgtggtggagctactggagcaagtccaaagttgcttaaagatgcaacttcaattccaacaatatttgctctttatcgtgctagaaaatacatagatacacatggattagatatagatttggttataacaggtgggcttcgtatatctactgattttgctaaggcaattgctatgggggctgatgcagttgctattgcaagttctgctcttatggcagcggcgtgtcaacaatatcgtatatgtggttctggtaagtgtcctgtaggagtagctactcaggatgaggaattgagaaaaagattacatatagaaaatagtgctaatagagtggcaaactttttaaatgtaagtttagaagaacttaagacttttgctagaatttctggtcataaagatatacatgatttaagtgttgatgatttatatactgttaactctgaaatatcaaattatacaaacatacagcatgtatagattgaagtttgaaactattagattttagatagctataaaagtaaatgataaatatattttataaaagagagtgtcttaaaatgaactttttagttcataagtcactcttttttgtatgaagccaaatatatttatcattttagcaatgaaaaagaatcttatctctttattttgagatagactccttctatttatgaaaattaaagatattaaattgtaaaatattctgtgatgtcgtactattaaactaaagattctgtactttaaagtaaataaaaatttaaggagtgcttattatggaaagattgaagatacaagttttagttgacaataatacttatattgatagatactttgttggagaaccagcagtaagctattatattgagattgatggaaataggattttgtttgattcgggatattcagatgtattcatatcaaacgctgaaaaattaaatatagatttaggaaatttaactcatgttgttttttctcatggacataatgaccatacaagaggtatccagtttttagaaaataggtatgatttatctacagttgaacttatttcacatcctaactgttttatacctagaaaacatggagagaaaagcataggagctccattttctgctgaggaaattaaaaatatttttatgtataatcctaaggataagccatttaatctaagtaagaattgtgtgtttttaggtgaaataccttctataaataattttgaaaaaagagctaaaattggtaaatgtaaaataggagatttgtgggaagatgattatgttttagatgattctgctatagtttgtaaaactgataaaggtatttttattgttacaggatgttctcatagtggaatttgtaatatagtagagtatgctaaaagggtatgtggagatgatagagttattggtatactaggtggttttcatctttttgaattgaataataggttagatagtacaatacaatatttggataaagaagaaataagaatgttgtacccttgtcactgtgtttcttttaaggtaaaagctaagatgaatgaaatattgaatataaatgaagttggagtagggctgaccataagtatatagtatttgaaagtatataagatttaagttgaaggttaaaaagatattttctatataaagtatcttttttgttacgtttattttaagagaaatcaatatacttttatatgaaatattgtaaaaaaatttatttttaatgagaatatattttcattaataaacaattttattatgtattaataatgctagaataaatataaataaatcaaagttacttacattaaagtatattttttcacaaaatatattgatttattcttttaaagtttgataattccaatgaatgtaataaaagaagggattttatactatacaattattattataaaattataaagaaaaaattaaataataataaagaaaaaatgtataatatttaacattaaaaaagatatttcataaaattaaaaaacaaagtgaatttgaatactatttaaaaaataaaaaaatatataaaaaatatttaatacaaaggtagaaataagttgaaaatgtaaagtcattggaaaaatatagttgaatttaatgaacaaaaatgttattgttttatcaatgaagtgttaaaataaaaactttcaatatcattttagggaggatgatttcatgcaaaaaagtgtaaagaaagcaaaagtaacgggatctatgttagccatttttggtgttgcaagcgttctttttagttcacatgcaggaggaggatttgctacagggaatcaagaaactcagtactatgtgcagtatggatggacagcaccacttatggcaattttagcaatgattatacttactgctaccatgagagaagttatcataatgtataataataacaattgtaggaattataaggatttattttgtgagctttggagaccatatccaaaacttgaaataatatgggagatatattactatctaatggttttaatagctgtaagtgctgttatagcaggtgcagcagcagtatttcaaagtataggagtaaattattttgtagctgtatttattattggagttgtacttcttgtctttactatatttggtgctatgcttgtatctaaagcagctacagcaatgacaatagctattctagtatgtactcttactatttttattgttggtataaaagctaaagtaccagaaataactgaaatattatcaaatagaacgagtttcacacctggctatatcaagccaatacttaatacttttatttatgcaggttttcaatcggttgttatacctacacttgcaggatgttcaagaccacttcttaagaactcaaaagaagctactaaggcaatgataatttcatttgttatgaatgcaattgcattaggacttgctgtaactatgctaatgggatggtatagagaaattattgctgctgggcaaacaacactccctactctttatgttgcaggtcaatctggaaatcatactatatacataatttataatgttgcattattcctttgtttaatgtctacaggagtaactactatatttggtcttgtaaatagatttgaagaccataaagcactttctttcctttcttcaagaatgaaaagaagggtatttacagcttgtgcaataatggtagtgtcaatgcttatatcacttacaggattaagtaatattgttaaatatggatatggatattgtggttatcttggtctattcactatagtaattccattccttacactaggacattataagaataagaagtttgcaaaggaaaatccagaagctaaatggccagcggaattaaatgaaaatgtaaattagatgtagtagcaaaaaatattgctaaagagaatactataaataagaatactatagataatatatctgcatgtttattaagattatttgcaaaatctaatattgaacaactataaacaagcaatataaaactaagaataaaagataaaaagagggtgtctcaaaatggacttttagtttataaggcactcttttttatatgaagtcaaatatattttcattattttgacaataaaagagactaatcctactttggatagcctcttttttctttaatataaaatagtataacagcaaagtatagattgatacatgttttctgtagctttctatatattacagtgtttgtgtggcattggtattttaagcaatctataaattataattctataattcttctactaattttagattctatagccgtctctatttcacttaacattcgttcatttttagggtcaataaaagcacatgtatagccttcttcaccagctctaccagttctaccaatacggtggatgtagtcttctggtgtttctggtaaatcgtaattatatatatgacttactccagatatatcaaggccacgagaagctacatctgtagctattaagtattgtatatctaaatttctaaatgatttcattattctttctcgttttgattgagcaatatcactatgaagtttttgacaattatatcctcttatagcaagagcttcttcaagattgtcaacccttctcttagtcctacaaaatattattgccataaaaggattatcttcatctagtaccttacataaggcatctaatttttttctatctgtagtttctactacttcttgttttatattattaagagtgatttcttctttttgaatagaaactacaacaggattttttgtgtatctataagctaatttttttacttgagaatttatagttgcagaaaagcatagtgtttgctttttgtttgaagtctcttttaaaatagcttccacttcgtttttaaatcccataagcaacatttggtctgcttcatctaaaacaaaagtctttaacttactaaggtctattgtttttctatttagatggtctaaaagcctacctggtgtagctataatcatatgaatatttccttttagtttctttatttgagaaccaatatcttttcctccatatgctgcaagaatacttacatctttagattctttaagtttcatagcttcttctgttatttgaatagctagttctcttgtaggagaaagtataagtacttgtatatcatttatatctaatgatatattttcaaatatcggaagtaaaaaagctagtgtttttcctgttccagtttgagcttctgctattacatcttttccttcttttattagtttaatactttctttttgtataggtgtaggtgttgttattcctgatttttttagaatatttattgtattttcactaatccctaagcttttgaaatccattgttatcttacctttcatgaaaaattttcttttttattaaccaattaataatatcatatttgtaagtatttttagtaaattttttaattattatttatatagcttaaaaatatattaagatactttaaaatggaatgtaacttaacttaaattttagtaggaattttataggtttatttttaaaggttttttgaaaataaatctatttaaaaattaaattaaaatgcaagaaaaacataataactttcatttttaagaagttttcacaaaaaagaaaaaatatagtgcaataaatgatacaaagtaatataatagattacaagatatgaaaagctaaaaaaataaattgcaaatgaaattaaaatgaataaaaaataaaaaaataatcataagttagaggtatcaatgaaaaataagacttaatgtttttaaaattaaaagtatactaaggggggcattaatatgtgcgttatatcaaaagatagagcaaaggaaataaaaatagtagatactactttaagagatggagagcaaacagctggggttgtatttgcaaatagagaaaaaataatgattgctgaaatgttaagtgacctaggtgttgaccaaattgaagttggtatacctactatgggtggagatgaaaaaaatgtaataaagcacatatgtagtagaaatttaaaatcagatataatggcttggaatagagcagtaataaaagatgttgaagaatctatttcttgtggtgttgatgcagtagctatatcaatatcagtatctgacattcatatagaaaataaattgagaacttctagaggctgggttttagaaaatatggctaaaacagttgaatttgcaaagaaaaatggattatatgtttcagtaaatggagaagatgcttcaagagcagatatagacttcttaactgaatttataaatgttggaaaacaagcaggggcagatagatttagatactgtgatacagtaggagttatgaatcctttttctataaagaatgcaatagaaactctttatgaaagaactaattttgatatagaaatgcatacacataatgactttgggatggcaactgcaaatgcacttgcaggaatagcagcaggagcaaattatgttggtgttacagtaaatggattaggtgaaagagcaggaaatgcagcattagaagaagttttaatggcacttaagtgtgtttataaatgtgatttaaataatatagatactagaaaatttagaggaatatgtgagtatgtagcacaggcatcaggaagaatacttcctacatggaaaccagtagttggggataatatgtttatacatgaatctggtatacatgcagatggagctttaaaagacccgcataactatgaaccatttgacccaagtgaagtaaatcttgaaagaaaaatagtaataggtaaacattcaggaagagctgcagttataaataagttgagtgaatatgaaatgtatatttctccagaaaacgctaccaagctattaaatgctataagagctacatctataagattaaaaagaagtttaatggataaagaaattcttcaattatattgtgatatactagcacatgagaaaggcacaacagaagaagaagcagttagaggttcatatatttaagatataattgtttaggaggaaaatatgggagataatatagtttataaaataattaaaaaacatatagtagatggagaagctgttgctggaagttcaattggtataaaaatagaccaaactttaacacaagattctactggaacaatgacatatcttcaactagaagctatgggaatagataaagtaaagactaaaagaagtgtggcatttgtagaccataatatgttacaacaaggatttgaaaatgcagacgaccataagtatatacaaacagtggcagataaatatggagtttatttctctaagccaggaaatggtatttgtcatcaagtatttttagaaagattttcaacaccaggagatacacttttaggttctgatagccacacacctactgctggaggtgtgggcatgatggctattggagctggtggattagatgttgctttagccatggcaggaggagcatactatataaaagcaccaaaagtctgtaaggtgaatctagttggaaaattaaataatatggtatcatcaaaagatataatattagaagtgttaagaaaacaaactgtaaaaggtggagtaggtaaagtttatgaatatggtggagaaggtgtcaaaagcctatctgttccacaaagagctacaataacaaatatgggggctgaacttggagcaactacttcaatcttcccaagtgatgaaaaaacactagaattttttaagagtcaaggaagagaagacgcatggatagagttaaaaccagatgcagatgcagtttatgatgaagagattactataaacttggatgaattaaaaccattagctgcaaaacctcatagcccagacaatgtagatgaagttgaaaatataggcaagattaaaatagaccaagtggcaataggaagttgtacaaattcttcttatgaagacttaatgaaagtagcacaaatcctgaaaggaaataaagtacataaggatgtgagtttggtaatagcaccaggttcaagacaagttatggagatgattgctagaaatggggctttggcagatataataagtgctggagctagaatactagaaaattcttgtggtccatgtattggtatgggtcaatctccaggtactgactctgtgtctttaagaactttcaatagaaatttctatggtagaagtgggactttgtcagcacaagtatatttagtaagtccagaagtggcagcagtaagtgcaatcaagggagtgcttacagacccaagagaatttgatattaaatttacaaatttagatgtaaatgaatttttgatagatgatagcatgataattaaacctgctgatgtaggaagtaatgtagaagtagttagaggacctaatataaaacctttccctcttaatacagagctaagtcagtctataggtggaaaagttatattaaagacagaagataatataactactgaccatataatgccatcaaatgctaagttacttccttttagaagtaatataccgtatcttgcaaactattgtttcaatactgtagatacagaatttcctcagagagcaaaagacaataatggtggatttatagttggtggagataattatggtcaaggttcaagtagagaacatgcagctttagcaccattatatctaggtgttaaaggggtaatagttaagagctttgcaagaatccacaaggctaacttgataaatagtggtataattccaatggagttttgtgatgagaaagattatgaaaatatatctcttttagataatctggagataccaaatattttagacaatctaggtagtggaattttagaagttaagaatacaactaaaggaacttcttttaaggtcaaagtagaattgtcagcaaaagaagttgacgtattaaaagctggtggaaaattaaactacactaaaaatcaagctaattaatatgaaaagagggaatattgaatgtataaagtgacacttataccaggagatggaataggaccagaagttgcgaaagctatgaaaaaggtagtagaagctactggagcagaaatagaatgggaagaagttaatgcaggagaggcagttattgaagagtatggtactccacttcctgaatatattatagatagtataaaaaagaacaaaatagctataaaaggcccaattactactcctgtaggtaaaggatttaggagtgtaaatgtaactttaagacaggcattagatttgtatgtcaatttaagacctattaaaagttttaaggggataaaatcaagatatgaagatgttgatttagtggttgtaagagaaaatacagaagatttatatgctggaatagaacataaaataggtgattatgcagctgaaagtataaagataataacaagaagtgcaagtgaaagaatcgttgattttgcatgtaactatgttaaagataataagagaaaaaaagttacagctatacataaggcaaatataatgaaaatgtctgatggattgtttttagatgtgtttagagaagttgcatcaaaacatggtgtagaatatgatgatttgattgtagatgcagcagctatgaacttagttttaaatccagaaaattatgatgtaatggtaatgccaaatctttatggagatatactatcagatttaggtgctgggcttgttggaggtttaggtataattccaagcgcaaatattggtaaagattgtgcgatatttgaagctgttcatggaagtgctccacaaatagcaggtcaaaataaggctaatccaacagcacttattcaatcatcagtaatgatgcttagatacttaggtgaatatgaaaatgcacaaaaaatagaaacagctttagaaaaagtatttcttgaaggaagtaaattgactgtagatttaggtggctcagcttctactacagagtttgcggatgaggtgtgtaagtatattgtatagattttatttagggaaaaagtgaaatatagattgaaggaaagaggctttctcaaaatagagataagcctttttttattggaatgataaaatatatttgattttatacaaaagagagttcctcataaacgaaaaagttaattttgggatatccattttaattttaaaattaattgattaatacgcaaagaaagattaaacaaatttattatttttaattgaactttcaaccaaaatatggtaaaatttaaaaaagttgaactttcaactaaaaataaatatattgattatgtgaaattctataaaacagaaactatttgactttagtcatggtaggttcagtggaggtgtgtttgattaagactttagatagtaatatattaagagaagtaggtactttatctagagcagtaaattcaataaatgatattaagtacaaggaattaaagttacaaaaaggacaatttacatttttgacaagaatctgtgaaaatcctggtataaatcttgtggaattatcaaatatgttaaaggtagacaaggctacaacaaccaaggctatacaaaaactaataaaggcaggatatgtagataaaaagcaggatgagtttgataaaagaggatataatttaactccaactgataaatctttggaagtttatgagttgataattgaagaagagaatagaagtatagagatatgttttgataattttacagatgaagaaaaacaagtggtaactaagttattagaaaaaatgagcaaaaacgtagaaaatgaatggtttaaagtaaagagatagtaaataaatacattaacttaaggagatatttttatgattagaaaagcgaatatgaatgatttagaaagcattatgaaaattataaaatctacagtggaagaaatgaagacttataataatacacaatgggatgaaaactatccattagaaaaagactttgtttcagatattaagaaacaagatttatatatttatgaagtggatggagaagtagcaggatttatatgtcttaattatgaagagccagaagaatatttaggcttaaattggtcatctaataaaaaagcaatggtaatacatagaatggctgtaaatccaaactttagaaagacaggaatagcatctaagttagttgattttgctgaaaaattagctgtagaaaacaatgtatcatacttaaagagcgatacatattcaataaactcaaaaatgaatttattacttacaaagtgtggttttataaaaatcggagaaatgagttttttaggaaaggagaaatctttctactgttatgataaaatattataaagagcatttataatacaaggggtaaataatagattttcagcattagtaagggcataatataacccagtatatgctattatgaaagggatgatttatatgattggatttctaaagaaaagaagaagtattagaaaatacaaggatgttgaagtagaaaaagaaaaattagataaaatattaaaagctgctcttttagctccatcatcaaaggggcttagaacatgggaatttatagtggtagatgataaagaaaagctaattaatttatctcaatgtagaactaagggtggtggatttttcttaaaaaatgcacctttagctattgtaattattgcagataaagaaaaaaatgatgtttggatagaggatgcaagtatagctgcttcatacatacaacttcaagctcatgaactaggtttaggttcttgttggatacaagtaagaaatagaatgtatgatgataatatagaagctgataagtacattagagaagaattaaaagtacctagcaagtacagtgtagaatgtataatttctataggatattctgatgaagaaaagaaagcatacaatgactctgatttagactataaaaaggttcattttaacaacttttagtatataatatgttgtattaagacattatatttttttctattgttaatatatacttaaaattgtaaaaatatatctgaattttactaacttatctaggggttatgtacaaggattttaaagataaatatagaaattaatgtttataatcgatacataacttgagtaacaaaatttaaggaggttaaagtatgggtatatttaaaacaaaaatggatgaggactggaaagtaaactacattaaagagtttaatgaaatgagagattcttatgagagtaaacttcaaaaaaaacagtttgaggtagatagtttgaaatcagaattggatagactaagaagctataaaaatagccttaagccaaaagaaaaacaaattactgatgatgatataaataatataaagagtttaagaagagatggcttaagctataaagaaatttcaaatcaaacaagttggagcaaagcaactgtaagtagggtattaaatggactttacgattagcatatacatggggtgatttaaattgggatgaagtatagttacaaaaaatgcataatagattctattttattgatgtttataattcaaatattaaggatgattttgaattatgtacttctaagtcaatttgaatttactcttgaaaattttaatattataaacttaatttcttttacattagttggtttatcgttaattttatttttaaaagataattctttgtataacaaggttagaaatagaaaaatcacagaagcttttgaagaaaataaaaacaatatacttattgaaaagtgtaagcttatactttttgttgtggttttatctttagcaataattgtaacttattgtactaagggatatgtactttttaatgtaactatgatgactttgtctgtattgatagttccaatatttgaagagttattttttagagaatatatatggaactatctaagtaattttataaagtcaaagagtaaaattatctgtataacatctatactatctggaatttataatataggatacatagatgttataagaaattatgtaatattgtataacaattcaagctacacctttgaagttattatttcaaaaattatgataggtactgtttttggtattgtacttggattagttaagtataggtttagagatgtagggttttgtatattattgaggagcttatttgctatatttattaggtagatagtataatcggtttataaggttgttttaaatttaattttaaatcaaccttattttatttgtgttttataaaacacttatatattaataactaataaatttaataaagattatttgaatatttttaaaatatataaatatgtattgacatataaatattatgaattacaatttatataaactaataaaaattaaataatattaatcaacttattgaatggaggaataaaaatgaaatttgtgactttttgtagtagcaatgaagaaaaaataggtgtatttaattcagaaacaaatagtatatatgaaattaatagtttaggattaagtaaattatatactgatatgaatgattttattgaaaacgtatctacaggagatttagaaaaaataaaaaacaattcatttgaaaacgcaaagtgttataagttagaagaagttaaattatgttccccaattgtaagacctaaaaaagatattatatgtttaggtctaaactataaagaccatgtcaatgaaatcccagatggagttataaaaaacgtagttatgccagattatccaatttatttttctaagagagcagacaaaataattggagtggatgataagataagcttacatggagatttggtagagaagttggactatgaatcagaacttgcagtaatcataggtaaagaaggtataaatatatcaaaagaagatgcttatgaatatatatttggatatacaatagtaaatgatataagtgaaagagcacttcaagataaacatgttcaatggtttagaggaaaaagcttagacacacatacatctatgggaccttgtatagtacataaagaagaatttgaacatcctttaaaattagatataagtagtgtagtaaatggagaagtaagacaaaattctaatacagagtactttatatttgatatacctactataataaatgatttatcaagaggaatgactctaaagccaggagatataatttcaactggaactccagcaggggttgctatggggatgaatcctcaagtatatttaaagcatggcgatatagttgaatgtaaagtcgaaggaataggagttttaaaaaatatagttgattaatggataaatatgccatataattttattagtacaaataatttaattaatataggattgatcaaacttatgattaatttattatagagagggatgagtatatggcaagagaactagaattaaagtatggctgtaatccaaatcaaaaaccatcaaagatttatatgaagaatggagaacttcctatagaagtattaaatggaaaacctggatatataaattttttagatgcatttaatagttggcaacttgtgaaggaattaaaagaagctacaggtcttccagcagcaacttcatttaaacatgtaagtccagcaggagcagcagtaggggtacctttatcagatactttaaagcaaatatattttgttgatgatttagagctttctccattagcttgtgcttatgcaatggcaagaggagcagatagaatgtcttcttatggtgattttatagcactttcagatgtatgtgataaggagactgcaactattatagcaagagaggtttctgatggtataatagctccaggatatacagatgaagcccttgaaatattaaaaggaaaacgtaaaggcaactataatattgtaaaaatagatgaaaattatactcctgagcctattgaaacaaaggatgtttatggaattacttttgaacaaggtagaaatgaaatattaataaatgaagaactattaaaagatattccaactgcgaataaaatttttacagatagtgcaaaacgtgatttaattatagctcttattacattaaaatatacacaatcaaattctgtttgttatgctaaagatggacaagtaataggggtaggtgcaggtcaacaatcacgtattcattgtactagacttgcaggtaacaaagctgatacttggtatcttcgtcaacatcctaaagtattaaacttaaaatttaaaaaggatataggtcgtccagatagagataacactattgatgtatatctttctgatgattatatggatgtgcttgctgatggcatatggcaaaacttttttgaagaaaaaccagagcctctaactggagaaggaaaaagagcatggcttaaaactttaacaggagtagcacttggttcagatgcatttttcccatttggagataatatagaacgtgcaaaaagaagtggggtaagttttatagcacaaccaggtggttctattcgtgatgataatgttatattaacttgtaataagtataacatagtcatggcatttactaaaaatagattattccatcattaaaatactgaaagtataaagataatatagattaagtaaaaatctacaacaagttttgttgtagatttttttatttgctgtataattttaaatagaactttatttttagatattcaatttggaggttgatatggctttaaatataagaaactatagcctattatgtaatcaaggaacagctaaatttaatgaagatgtagtcggtataaatccatttggggcatgggttttagatggtgctacaggacttaatggaaaaaatttagtgtcaaatgaaagtgacgcaaggtggtatgttcagtggtggaataggtatttatataaaaatataaataaagaagaatcattaaagagtattattaatactggaataatagaagtaaaaaaagagtatgaactaagattaaatgggtttaaggttgaaaaattagatttaccatctagttctatagttgttgtaaaatttcatgaaaataaagtagagtattttttattaggagattgtgctttgtttattaaaaatggagattccaaagttataaaagataggagtatttgtaaatttgataatactgtatttgatgaaatgagtaaactttctaacttggaagagatggcatttgatgagattagaactagtgttatggatacaatagtaagcaatagattgaagaaaaatacgaaagagggctattggatattggattttgatgaggaagctgtggaaaattctatatatggatacattgaaataaaaaaagattttcaattgatgctaacgagtgatggttttacaagtgcatgtgatagatataatctaataaaagaagaagaattgatacgtatagcagaaaaatttggtataggatatatacataataaagtaagggattttgaagataatgactataaagcggttaaagtgccaagatttaaaataaaagatgattcatcttgtttatatttagatatatataatgattagactgtataaaactatttaattttagaaaggaggcaagtgaaaagtgaaaattcttcatataataacacaaaaaccaaatagtacaggtagtggtatatatttgtctggtatgataaaagggttcgaaaaaatcggtcataagcaagctgtaattgcaggtatagatgtaaatgatgatgtaaattgttttccaagtgaagtaagtttttatccagtaaagtataattgtggggagttaaattttcctgttgtaggtatgagtgattctatgccatatgaaagtacaagatataaagatttaaatatagacatgataaatagattgaaatatcaatttaaagtaaatatagataaggctatgaatgattttaaaccagaacttataatatgtcatcatttgtacctcttaactgcatttgttagggaaatagtaaaagatataaaggttatgtctatttgtcatggaacttgtttaagacagttaaataccattgatttagagaaagaatacataatagcaaatataaggaaattagatttaatatttgctcttcatgaaaatcagaaatatgatattataaagacttttggagtaagtgaaagtaaagtagttgtaattggtagtggttataatgatgatatattttataataaaaattataaaataaaggatgataaaataaaaatagtatttgcaggtaagatatgtaaatcaaagggattgattccatttataaaatctatatctaaattaaaatatagtaaagatttaatagaagtcaattttgcaggtactggaagcgatatcgaatcatataatgagatagttaaactggcaagtaagtctccatttaaaatgaatttcctaggaaagttagaacagagagatttagctgagctattcaacaggtcacaaatatttgtgttaccatcattttatgagggattaccagttgtagttttagaagctttatcttgtggcacagatgtaatcactactgatattcttggtgttaaagagtggattggtagtgagattaataattctggaaagatagaatatatttctctaccttttatggagaaagaaggtattccaaaagatgaagagttatatgattttgaaaataatttgtataatgcaatagattctaagatacaatctttattgaataactcaaatgagaaaacatctgtagatatgtcaaaaaaaacgtgggatggcttagcatatagaataaatgaagttattttaatggatgaattgtgtttagtctaaaattatttaaattataaaaaagtgtaactatttttaaactttttttaaatgattttatattatactaatactaaatatatttgttttagggaggtaatttatgaggattagtaaaaaggtattggcgttaggtatttcagcattactgttaagtgttagttttccaacatcaataaacgcactagataagattgaaaatattcaaggagtagataaatatgaaacagctgggcttatttcagataagcaagattttacaacagcagttcttatcaatgcagattctacaatggtagatgggattgctgcaagtggtcttgcaggagtaaataatgcagctattttattaactaataaggatgatataccagaagcaacacttcaaagactgaatagagttactaagatatatgtaataggtggagaaaattctataagtaaagatgtagaaaaaatgttacttatgagaagaatgcaagttataagaattgatggtgtagatagagtagatacaagttataaaattgcaggtgaaatagaaaaaattaaaaacagtgataagatgtttttagtaaatggatttaaggatgaagctgatgcagtaagtgttgcatctgttgcttatagagatggagctcctataatattgacaaaagatataccttcagcagaagaagacacagacttagacccatggtttggagtttctcctgttccagtatatgctattggaggagagtctacattaagtgattacatagtgagcagatatagagcaactagaattggcggtgttgatagatatcaaactaataaaaatgttattgaaaagttctataatggagcaaaagagttctatataacaagtggagacgatttagtttatgctttagttgcatcaccacttgcaaaaaatgctcctgttgttttagtttcaaataaaagtgataagagtatattaagtggagctagtaaagtaacagcaataggtataagtgataagagtattatagagcaatgtttggatgctgtaaagaagtaatggagtgttattagtaaaatgaatatatacattgaaaattagtagattgttcattttataatggtataaaatatatgggaagaggctatcaaatggagataagcctcttttttattgataaaattatgaaaatatactttattttatataaaaaaagtatctcatgaactaaatgtctattttgatatactatctccttttcttatattatatgtattatatgattttttatatggaataaatttcataagtattatcttcctttaatttttctaaccaaatcatctctaaaatatctagttcttctaaatagtctttctctgttttgttatcatcatgttttataagttctaaaacttcaaatgtaaatgctttttcaccatattttttccattcattatttaattcttttatcatacatgagccagcaccaagctgaaatttgagagagttaaatttgctttttatgtcattactttttccaaggtaaatctttttagtaatatcattttttattatgaatacacctgtgtcaaatttcatttctttgtataattgttttaattcacgttttctatccatgattttagatacctctctttataattgatatgtaatatgtaagtttaaaaatatattacatatcaattataaagagattaattttatatgtaaatagtttttataaatttaattatgaattagtcatcaataaacaagaaatttagctgtagaaatccattataaaggctattataaattttaatatgctaaaaatataaaaagaatagttgacagtatagaaaatatggaataaactaaaagtgtaatagtaatacgaaattatatattacattgaaaggtgtgaatgattattatgaataaaaaaatagaattaatagggaattttgcaagtgattggattaggtatagtgattatgaatataaaattactgaagaagatgaattatatatagttccaacagaagatgctgtgtttaccatgtataacccatttgatgtagcagatgatataatagtagatataattcgcataggacaagaggcattacaagatatatcaaaagagacaaaagaaatgaaactaaagaaagaagtacttgaatttgtaaaaaagtatggattattgggtttaatatattcaagtgtatataatagagatatagttggagaagaaagagtactgatgattgaaaagaattatattacaaaagagaatatattgagtacagatgaatatgtaaacatgtttataccatttgcaagtgatgaagatgtgtattttaaaaaatatagaaggggtatagatgtatcaaagagagaagaatctccaaagttttttggaaagagaccattgattttagatttagtattttcaaagttctacactgaacaactagattggattgtaagttttgctaaagatatgtgtaagcattttaatcaaatttgtgtatataaaaatacatctaatctattaactgaaagtgttactattatgtctggagggtttaatcctcaaaagataggattttctataagccaattagataaaccaattattgcatgggagtttgattctttgaaaacagctattgagactatctatgcctttgcaattacaagtgaaccttcttctttaaataaatgcaagtactgtggtaaaatttatattcctacaaattctaaatctcaatactgttcaccttcttgtagaaattgctcaaatgtaaagaaaagtagaagtagagccaaaaaagataaataaaattaataaatatatcattgtttagattttagtaaataactactgaattaaaagttgttatagaaaattatatatctaaatgatggtatttttttgttgagaaaattgaaaagtttaattgagatagtaattttgagttgacaaaaaccacttttaacactactattataagtggttggtaaaataatatacactaatttaaatatagcataaaaaacaaaaaaagtcaatgaaaaaaataaaaaaggagaatttaaaaatgatatcacctattattttgagttctataaatcagaatttaaaggaaatagaaagaaatgaactgcttgaaactaatatagaatctggagattatggtctagctctttctgaatctgatgtaaaagatataataaattcgagagataatactttaaaggggtatggaagaatagaattagatataaaagttacaaaacagttaatagaaaatatatatacatcacaatatacaaatgtggacaattatttagaggctattaatgatatgcaagaaattttttattatttaaaaaatgaaactgatgacaagatatgtgatgatgagattatagaaatactgggtgaattttatgaaaaattttcaggcaatatggacaatgtaagaggagaagcagacgaatttgcaaagaaatttaaatttggagaagtttaatatatgataggagagattttgtatgttaaataatttaagtaatattaatataaacgaaaataatttaataaagaaccaatattccatatctctacttaaggaatgtctaaattgtaaagtgatagatgaaagagaagtatataatatacaacaagaaatatctctaatacttatggatttgattaaaaaatatacaaatggtcaaagcacatcagtaaaaacagaagttgccgaaaaactgttgatttcaatatggtatgctattgatgcatatataaataagcttggagatatagaaaaaagagttgtggagttgactgctaagaatgttaaaaaagtgtaccttggaggcattgaaatattagaggaagagttagttaggctgaaagatttttataaactaatgatgagtagaaaattggatactaattcaatagcatataatgataccttgatggagttatcaagtttctttaaaagttatattgtaaaatttgaagctcaggacgttccagtaagtatagattatccattggcactagatgatatggatgttaagggtatttattatgtgaagaattatattgagagtatagatatagaaaatagattttgtaacctatttaagaaaaaagatagagaaaaattattttatgactatggggtgatttataaaatagattgtgatgttatacttgtaaatttatttgaacttattataaataattgtattttttctactattttaggaaatgaagtgattaatttagaaatttcaaaatatgagtatgaatttttagaaaaacaatttaaaaatatgtacaataatattactgaagataaagttataggctctgaagaaagtaatataattgaattgattgaagtagatgatagttttaacactgaagtagatagtaatttggattataatgattttgaagaaattaacagagaaattagaataaataaaaaaataactttactacttatggaagcaattgaagtattaataaaaagattaagcatagaagatgaagatgtaataagatatattaaaaaatatgaaaagatatttattgaatctgtgctaagctcaataaaaagtaacacttttaaaagtatggtaactgtgagtaaaaataaaaatgaacacttagaagactatattgttgatgatgaaagtaaattggatgatgaatcgtttagagagatattcaatgagatattagatagtacatctataattgaaaaaataagaataataaaggaaaatatcaatgctaaaaaagactttatcgatattcttgaatctgaatgtttatttggagaagagtatttaatgttgtttgcatcattaagtgaattagaattggcaatattgggtagtgtagtattttatgaagatattagaatgagagaaattaatatattagaatttatgttaaatgagaaaactgaaactactttatggaagacagagtacattaaatttatgaagaggcaaagtgaagataagatatactccatagaagagcatatgaataaaattaattaacaaaaaattgtgaataaatagaatgttagtatataatataatctgtaaagcatatcaaaaatacatatatttggaggaaaattatgaaagagtatatcataaataatgttgaagaaataagagaagaattaattgatttatctaagaaaatatgggaaaatccagaattagcctttgaagaaaagtatgcaagtagcattcaaaaagaatacctaaagtcaaaaggatttaaaattgaagaagtagaaaatttacctactggatttatagcaagttttggagagggtaaacctgtgattggcatacttggagaatatgatgctttaccagagctatcacaatgtgtgagtgcagaaagaaagccattggtagaaggaaaagctggacatggatgtgggcataacctgttgggtgtagcaggtgtaggagcagttgtttctataaaaaaattaatagaagaaaataaatttaatggaacaataaaatattttggttgtcctgctgaagaagaaggtggaggaaagacagttatgtgtataaatggctgttttgatgatgtagattgtgcatttacatggcatccttttgatataaatgcaccttggagaggtggaagtctggcaaacttatctgtaaaatttaaatttaaagggataacagcccatgcagctcaagctcctcataatggtagaagcgcacttgatgctgttgaaattatgaatgttggagctaattatttgagagaacatgttattgactctataagaatgcactatgttataactaatggtggtggaagacctaatgtagttcctggatttgctgaaagttggtactttattagaggtaaaaaagcaagggatgcagaacatgttcttgatagattaataaaagtagctcaaggagcagcaatgatgacagaaactgaaatggagtataaggttacagatggaatatatgactatataccaaaccaatgtttgactgatttagtttatgacaatatggtttttgttggttgccctaaaaatactcctgaagaagaagaatttgcaaaaaaattgtgtgatactcttactagagaagaaagattaggtgtagcaacatcattacaaaatgataaatctattgtagaaagttatatacacaaggaaatagttgacggtgacaaagataaaggactagctggttctactgatgttggagatgtaagttatgtaataccagtggctcaatttgcaatggcagcttggcctgttggaattgcaagtcatacatggcagtcatgttcatcagcaggttcaaatataggattttctgctatgataaattcagctaaagtactggcttgtagtgcttatgatgtatttatgaatactaaaattattgatgaagcaaaaattgaatttgataaatcattagatggacaaaaatttaaaccattggtataattttggtaataaaatatttctggggggaatagctatgagagaaaaagttgaaaaagtgcttgaggaaaagataaaaccagtattacaaagagatggtggagatgtagagcttatagatgtaaatgaaaatggtgtggttttagttagactacaaggggcatgtagtgggtgtccaggagcgactatgacaatcaaagctattattgaaaatgttttggtgagtgaagttccaggagtaactcaagtattaggtgtttaatagttagcgtttattaaatgtatgttatacataagtatttaataaagaagtaaaaaaaatagtgaagcaatatatatgaaaaagtatgataaagataataaaacattatagaaataatgaaatatttcatatgtatatgaagaaataagaaaaaatagtgaagcaatatatatatgaaaaagtatgataaagataataaaacatttatagaaataatggaatatttcatatatacatatgaaaaaatagtaaaacaatatatatatgaaaaagtgtgagaaaataataaaatactatagaaacaattaaatattctatataggtattaagaaacatgaaagaaataatggagtattatagataaatatgtaaaagtgtgaaagaaggatgtagataaatttgtcttatacaaatttacctacagtatttcttacacactttttattttactatccaaccataccaataaacatacctataaagtatggaactaaccatatagtccatacaactatactaaacttatgaaagaattttttcttttcctcatcatctttgtataggacaaaagtagcccaacttgcatgaaaaagcataagcacaattgcaagaagacctgtaatactatgaaggttttgtgataaagcagattttacttcaaaagtatggctgttggctatgttactcattgtaaatgttcctaaagtatcaaatataaacccaagccaaaatataattacatgtttcttttttaaaatttttgcctttctttctccaaatacacctatagtgtagaaaattaaagctgatgttataaatactattgcaagtattaatttataattcataattatctctcctttacttttgccaatatatttctaagattttttactaagtcactcaattcgttttcatcacaatttttaaaaatatcatcaaaactttcttgcattttaattttaaaatttgtggcaaattcaaatcctgttgttgtaaacttaacgtatgtatttcttttatcattagatttcttgaatttttctatatatccaatctgttctaatctgctgattatgcctgaaaccgtacctttagctaaagacatttcatcacatagttgtgatattgtaagttcttgattatgagctaccagttttataactataatctgttggtgtgttaatccattttctttaaaattttcttctactgtgtacatagttttagaataaagttcttttaagagcatggctattctaaaacagtcataattacttttcaataaaatcacctcttaaatggtttgcatacaaactaatataatatacttttcttatatagtcaacctaaaattttataattttatagaaaataatgaagaatagaacataaaaattttattttaggtataaataaaataatttgatgaaattttaacaatttttaaaaagtttgtttacacagttaataaatgatgctaaaattaactcatagataaatatagaaaatttaattttgtttaatgataatggaaccacgaaggttttaacgttactttacgtttgcttttatgtggtttttttattgcaacaaaggggggttggggtttgttaaaggatatactgaaaaagttgttgcagtttattttagtaatgtttttattatcttttattgttttttacatggcaagacttgctccaggagacccattaatctcttactatggggatggagtagaaagaatgagtacacaagaaaaagaaaatgctatgaaaaaacttggtttgaatgaaccaatatacagtcaatatataaaatggatttcaaatgcatcaaaaggggaatttggaatttcatttaaatataaacaaaatgttacttctgttataaatgatgtctatataaacactataatattaggtggttcagggtatatacttacctttgtgctagccttattgttaggaatattttgtacattacatgaagataagctcattgatagaatcatatgcaaattaggaacaataaccaactgtattccatcattttgggttgccttagtactcatacttatatttagtataaacttaagtatacttccaagtagtggtgcttattcaatgggagaagagtccagtatattaagtaggatatcacatctaatcttacctcttacagtacttatattaagccatctatggtattacacatatatgataagaaataaattactagaggaaataagagaagattatgtgcttttatgtaaagcaaaaggtttaaataatagaactattgtttttaagcattgcctgagaaatataatgccatcatatattagtataatggccatttcgatacctcatatactaggaggaacttatgtagttgaaaaagttttttcttatcctgggttaggaacactttgttttgaaagtgcaaagtatcatgattataatatgttattagttttatgcttaataacaggggctttagtagtatttgggaatatgttagctcaaattataaacaataaaatagaccctagaatgaaatatgatagaggtgatactaatgaagccacaatatagtgattttgaaattgtaggagaaaattatattttagtagcagaagatgaacatatagaaacaaagaaaaccttatctaaaaaaattaaagaattaccatatatatcaattattattttatcaatcatagtcattggaagtgtattctcatcttttataatgacacatgaaccaacatacatggatttagcaagttctaatttagctccaaataaaacttttttatttggaacagactcaatgggtagagatatatattctatgatatggtatggaggaaaaatatctttatttataggactattttccactgtaatatcaactgttataggaattgtttatggtagtataagtggttcagcatctgaactcgtagatgatgcaatgatgaggtttacagaaatcatacttagtataccttcaatattaattataatatttgtacaagctatacttggaaattcaaatccagtatctatgtccatagtaatagggataacaagttggatgaatatatctaagatagtgagaacagaagttagacaaataagaaatagcgaatacatactagcagctaagagcatgggaggaggattcttctatgtattaaagcaacatttacttccaaattttgtggcatcaataatgttcatggttgtaacaaacataggcgcagctattggtactgaatcgacacttagctttttaggaattggtttaccaatagaaattgtttcttggggaagtatgttatctttgtcagaggaagcattactttcaaatagatggtggattatactgattccgggtatatttttggttaccacattggtgtgtataacaaatataggtaattatataagaaagaataataataaaaaatctagtaatttataaatcagcatttgagtactaaataagcaaatactgaggtatttgaaatatctatttaaataaatggggtcaaagctttgaaaaatattttataaaaagcaaaagggggagcatcatgaaattaaagaagttaaaagttttaagtttagtaatgatacttagtctaatggcaggttgttctagtggaggagacaaagataagaaggcagatacgcctaaagatggaaaggtacttgtttatggaagtaatgactatacaagtataaatcctgcactatatgaacatggagaaataaattcattaatatttaatggattaacagctcatgatgaaaataataaggtggttccttgtctagcaaaggactggaaatttgatgaggcaacaaatacatatacttttaatttaagagatgatgttaagtggcatgatggagagaaatttacggcaaatgatgttaagtttacaatagaaactataatgaatccagataatgcttctgagatagcatcaaattatgaagatataacaaaaattgatgtggttaatgataatactataaaaattactttaaaagctccaaatacagcaatgcttgattatttaacagtaggagtattaccaaaacatgttttggaaggtaaggatatagctactgatgaatttaatcaaaaaccaataggtactggaccatttaaacttgaaaaatgggacaaaggtcaaagtataacacttgttaagaatagtgattattttgtaaaagaaccaggattagataaagtagtctttaagattgttccagatgataaggctaaggcaatgcaattaaaatcaggagaattagacttagctcaaataactcctaaagatatgtctaactttgaaaaagacgaaaagaattttaaagtaaatataatgaaaacagccgactatagaggtatattatacaattttaattctaaattctttaaagataaaaaagctaaaggattaccaaatgctttaagctatgcaatagatagaaaagcaatagttgacagtgtattattaggacatggtgtaccagcatattcacctttacaaatgggaccatataataatcctgatatagaaaagtttgaatataatccagaaaaagctaaacaagaaattgaaaagctaggttggaaattaggttctgatggaatctatgaaaaagaaggtactaagttagctttcgagataacagcaggtgagagtgaccaagttagagttgatatggctaaaatatgtgcacaacagttaaaagaaattggtgttgatgctaaagctgttgttgtaactgaaacagattgggctaatcaagatgctcatttaataggttggggaagtccatttgacccagatgaccatacatataaagtatttggaacagataaaggtgcaaattacagtgcttactctaatcctactatagataaaatacttcaaaaagcaagagaaacagaagataaagatgaaaaattaaagttatataaacaattccaagtagaaatgactaaggatatgccttatacatttattgcttatatagatgcaatatatgttggaaaaccaaacataaaaggattaacacctgatacagttttaggtcatcatggtgtaggtatattctggaacatagctgactggacaattgaataatactgaaattaattagaaaccttagggataaaaatatatccctaaggtttgaatagcataggggttgatggtttttggaacatttattggaggttaataatctatctgtaagttttaaagtagaagaaggagaagttcaggctgtaagaaatgtatcttttaatctaaaaaaaggtgagacattggctatagttggagaatctggttgtgggaaatctgtactgtgtaagagtttgatgaggatactcccatacaatggatatattaaaaatggagaggttttacttaaatcaagtgatttggttaagaagtctgaaaaagagatggaagatataagaggaaagaatatatcaatgatatttcaagaccctatgacatctctcaatccaactatatcaataggaaagcaaattgcagaagctgtaatcattcatcaaggtataagtaaaagtgaagcaaaaaagagagccatagagcttattgaattggttggaattgataatcctgagaaaagatttaaacaatttccacatcatttttcaggtggaatgagacaacgtatagtaatagctatagcacttgcctgtaatccagatgtattgattgctgatgaacctacaactgctttagatgtaactatacaagctcaaataattgatttaataaaggatttacaacataaaataggtttgtcaataatatttataactcatgatttaggagtagttgcaactatagctgatagaatagcagttatgtatgcaggaaagattgtagaaataggaactgtagaggatatattttatgaccctagacatccatatacttgggggttgttgggttcattacctactttagattcacaggatgaatatttatataatatacctggaatgcctccaaatttattgaacccaccaaaaggagatgcttttgcaataagaaataaaaatgcacttaagatagattatgaaaaagagccaccaatgtttaaaattaatgatacacatagtgcagcaacttggttattgcacccagatgcacctgaagtagatgtaccagttagagtaaattgtggaagggtgatttctaatgaatagagaaaaaatactggaaataaaaaacttaaagcaatattttcatttggacaaaagtactactgtaaaagcagttgatgatataagttttgatatatataagggtgagatatttggattggtaggagagtcgggttcaggaaaatctacaactggtaaaactataataagactacatgaatctactggtggagaagtaatttacaaaggaaattgcatatcagataaaaaaacgtacaaatttataaaaaaagatgtaaacaaaagtatgcagattatttttcaagattctacttcatcattaaatccacgtatgacaattgcagatataatttcagagccactaaaaattcaaggtatctgtaaaaataaaacagatagaatgaataaagtatatgagatgctaaagctagtaggacttgatagaagttatgcaaataagtatccatctgatttttcaggtggacaaagacagcgtattggcatagcacgagctctttcagtagacccagaatttataatagctgatgagcctatagcttctttggatgtgtctatacaagcacaaatagtaaatttatttaaaaaattgcaacaagaaaagaatttaacttgtttatttatagctcatgatttatctatggtgagacatattagtgaccgtataggagttatgtataatggaaaattagtagaattggcagattcaaatgaattgtataataatcctattcatccatatacaaaatcactactttctgcaattcctgttcctgaccctagatatgctaagtcaagaaatagaatagagtataattctaatggatatgattgttcaaatgaaaagtcattaagttggattgaggtttcagatggacattttgtatattcttctaaatcagaaataaataaatatcaacaaaatttaaaagttgtttagtataaaaatacttgaacaggtatttatttgaaatacaaactaaaaccctatttttggagaaattttaaaactactccaaaatagggttttttatttctacttttcaaatataataaattcaaatataataaaattaaaaacaagtaaagtatgttgttaagaaagtgctataaaattaaaaatagtaatgtagaaaaaatgagcaataatcttattttttctacaataattttctataatttaaagtaaggaaagtttgataaattataaccttagttaaagaataagagtttattaaaaaataaagtgtgtataggggttttagttaataaaatattataatgtaggggagcttgtaatgatatataaaaaagataaagtaatgaaagttttagaatcatcatatagggaaaatgaaaaagggattacagctaaccaattatcagaaaagacaggaattgcaagaaacaatataagtacatatttaaaccaattattcaatgagggtatggttacgaagataaaaggaagacctgtgtattatatccctgcaaatcttaaccttaacaagaatgaattgcttgatacacaaagtgagttgcttggcataaaaaaaggaacaaaagtagaaaacaaaataaaaaaagatagttttgaaacactaataggtaaagaacatagtttaagacctataatagaaaaatgcaaggtcgcaatgctctatcctacaaatggacttcatactattatctatggagaaacaggagtaggaaagagtatgattgctagatatatgtacgattattctatagatagtggaattagaaaaaataaagctccttttgtaacatttaattgtgctgattatgctaataatgcacaattacttatgggacatatttttggagtagaacaaggagcttatacaggtgcagaatcttccagaaaaggtcttttggaaattgcaaatggagggatactatttttagatgaaattcatagactaccagcagaaggtcaagaaatgttgtttacttttatagataagggaacatttaaaagactaggagatgcaacgaaagaaagagattctaaggtattaataatatgtgctactacagaaaatccgacatcaacactattagatacattcaatagaagaataccaatgaaaatagaaataccatcactgagagataggacaatgattgaaagaatggaattagtcaaaaattttttcaaggaagaatcaaaaagtatttctatttcaataaaagtacataaagaaataattaaatcactattactttatgattgtaaaaataatgtaggtcaacttcaaaatgatataaaattagctgttgcaaatggatacctaagatataaaagagataataaagaaccagtttatatagagaaaaaatattttgataaatctataaatgaagtgagtgatgattatagagagaagtctattaaagcagatgaagttataacacatggaatagaatattttgtatttacgtcattaggagaagaagaagttattaactacaatgatataaatattattaatgcagtaaatactaatcttaataaatctgtagaaatgaatatagcagatgcttctctatttaataatgttaagtttaaaagcatgtgtgaatcaataagacaaattattaaagaagatgaagaaatagatataagtgaatcaatatttaagtcaatggcaatttatataaaaagcgtattggataaaagtagctctacaaacaacatagatttgaatcaaattagaagaaataacagaagtgaatttaaaacagcactaaaaatagttggaataattgaaaatgaatttgatttatttttatctatagaaactgtagcatatattacattattcatagtacaagctaaacaagatgaacaaaataaaatagtgaataacattaatattatagttgctatgcatggagaaactacagcaagtaatggtaaaagcagttggtgatattattggaaagtgcagtgctatttctttcgatatgaagttagataaaagctatgatgaagttattgtagattttaaaaatttaattaataatatagacaataaagatgtattactatttacagatatgggttcattaaactcctttgatgaaattataaagaaagaaaaaaagtgtgaagtaagagtaattcctatggtgacgacattaactgtgttagaagcagttcagaaggccaatatgggattacctttaaatgacgtatacaactctatcactaacacgagaaagtattattttggaactaatgaaattcaaaataaagaaaatctgtctaaaacaattattatagcatcacatgtttcagaaggtgtagataataaaacaagaaaaatattagaagaaaagatgagtaggtacttagatggaatagatattatatctgtcccatataaaacagaaaaagatttaagtttaaatattacaaaacttaaagaaagtagtaatattgttgcagtaatcaatgaacaaagaattaatattagaggaattgactatattagcaaaaaagatatagataaggatgaaaatatcaataaattaaaaaatattataaagataagtataggttatgatgatgtagttgaaggtttaaagacatccttaaaaagctctaattataataggatatttaaagatataaaatatgtgtctgatgaattgtttttagtatttaatatagaaaagaaatacgataaagtaattggacttatgatgcatttagctttcatggtagatgggttgattggaaatactagagaaattgaaaagcttgataaagaaaaaacacttgattatcacaagagcctaagcaaaataaaagatatagtatctcaattagataaaaaatataatatagaaattaatgaaaaagagtgctatcaaatattattaatattagaatatgcagaaataatcgaaaaagattaccaatgagtataaaaacttatttggtaattttttttagtctaaaataatattaatattagacacatataaatatacttagacaaagtatctaagttttgatgataaaaatgattgaaataacagtgttttaaagtgtctaaaaaaactggcataatacttgcttatattattaaatgagtaatataaataattaaaatttaaataaaaaggagtaaataatatgcaagataaaatattaagagataaaaaggcaaatgacccatgggcaagaatgactacaagaaacggatttagtgcagacgaaataatatcgtcatttcaaaaagctataagaagaaatatggtggaagaagcttgtgaatttgcttatgaactatatatatcatcaccagaattagaagataagctatggagaaggatacttacaatatcagttgaagatataggaatgggggacccatcagctgtaataatcataaataatttaaatcaagtaagaaaggaatattcatatgcagatggagacagacctttatttttcatacatgcaataagatatctttgtgcatgtgagaaagatagatcaagtgatttattaaaaaatataattataaaaggatttgcaatgggtaaagttccagaagttatggacgtggcacttgacaagcatacatatagaggattagaaatgggaagggattcattccactttttaaatgaagctagtatagtaataccagaaaaagaagtagataatgattataaagaaagatacttaaaaatattagaaaaatataagcaagaagaagttatagatacggctttcaagtttaatcattggcagtactaagaattagagtaaatattaataagaattaaaataaaataataagaattaaagtaaaaactgataggaattagagtaagaattggctgataaaaaattagaaaataaaagaggttagatattgtaggagggtaattatgaatattttattagtatgtgcaaatggagcttcaacaggtgtacttgtggaaaagatgaaaagtttttgtagtgagcatgaaaagttaaaaactaaaactataaatatagaggcaacatcattcgaaaatttaaaatcatacattgaagctaatgatacagatgtagtacttgtagcaccacaaattaggttcaaggaagatgatgtagttgaagcttgtaagaattacaaaatagcagttggtttaatagatactaagcattatggtcgtatggatgctccttctgttatgaagtcggcaatcgaattatataaaaatagataattggggggaataaaaatggaagcacttcaaaataatttaagaagatttcttctaccaatagcacaaaagattgaaaaacaaaggcatcttcaagctataaaagaaggtatgataagcattaccccaataataattgttggttctttaagtatgttatttatggcattaaacaatatgttacctgaaggaagtgcaaaaacattattatctgaaaatatggatacattacttatccctaataaatttactatgagtttattatctatatattcagcattttttatagctcaggcactagctaaaaaatataatcttaatcatgtagaaataggtatgacagcagttgttgcacaacttgttgtatgtggacaagtagtagatggtgtattagatacaagttatttagatgcacaaggtttatttgtaagtatattagtagcacttttagtagttgatattactaagtttatgaatgataaaaatctcgtaattagatttccaaaagaagtacctagtgtagtaaataaaagttttagaaatttaactccaatgatagtatgtataatgttatttacagcaatagcagcaataactaaaaatgtctcaggtcaaccattaccagctattataatgaatttcttagcaccagctataagcagtgtagataatgtttttgcagtaactataatactatttataactcaattattatggttctttggccttcatggagcagcaataacttcaagtatatggatgccaatagcagctacatatatggcagaaaatgcaacactgatagcagcaggaggagacccaaaatatgtgtttacaataggattttactatggtttcttgcaagtaactggttcagggataactttgggattagtgtaccttatgtcaagaagtaagtgtaagagttttaatagtatgggaaaagttgtgattttaccatcactatttggaataaatgagccagtaatatttggaacaccaatagttatgaacccatatatgtttgtaccatttgtatttggacctgtattggttggagcacttaattttatggcattaaaagtaggattagtaggattacctattgcagaaccaccaggctttttacctccaggggttgcagcatttttgatgacattagattggaaggcaatcgtattagtatttgcaagtataatacttatgaccttgatatattatccattctttaagataatggagaaggaagaattaaataaaaatgcagaattagctacaacattagatgatgatagctttgatttttaacaagtcattagaaggagaaggatatggtacctgaaatggaagaaaaagtatttagtataatatcagaagcaggagatgctaaaagtgatgtaatgatgtctcttaaggaaataaaaaaaggtgactacaataaagcaaaacaccttttaaattcagcctcagagaaaatacaaacagcatcaaagcatcatttagaattactatcaaatgctatgaatagtgaagatagtgggactgattttttagttgtgcactctgaagaccattattcaaatgcattatttgctcattctttagtatctgaacttgtagatatatttgagatgatggacccaagaattaataagaattaaatttcttgtaaatagtgcttgaagtttggctatagtttattaaatcaatagatttaataaatgaactcccttttactttaaagtactagtatttataaatttatttataaatacagtaaatttttaaatagaaaaggagatattattatggaaaaattttcagtagtaatagctggaggaggaagtacatataccccagaaatcatattaatgttgctagataacttagataggttaccattaagagcaatcaaattatatgataatgatgaagaaagacaaaataaggtagctaaagcttgtgaaatactaataaaggaaaaggaccctaatatagagtatttagcaacaacatgccctaaagaggcttatacagatgtagatttttgtttagctcatataagagttggaaaacttgaaatgagagaactagatgaaaagatacctctaaaacatggagtagttggtcaagaaacttgtggaccaggtggaatagcttatggaatgaggtctatagaaggtgttcttgaaaacatagattatatggaaaagtattctccaaattgttggatgttaaattattctaatccagcatcaataatagcggaagctgttagaaggttgagacctaattctagggtaataaatatttgtgatatgccaataggtatggaacataatatagcaaggattgcaggactcaaatctcgtaaacatatggatataagatactttggattaaatcactttggttggtatacttcaattaaagataaaaaaggaaatgaacttttaccaaaattagtagaacatataaaagaatatggttttataaatggtgaagaaggaatgaaaaatgacaagaaagatagttggtttgaaactaatttatttactaaagaaatagtaaaaacagatttaactacaataccaagtagttacttaaagtactatctatttccagattatgttgtaaatcattctgatgtaaattatactcgtgccaatgaagttattgatggaagagaaaaagaagtttttggttcatgtgcattgatagaaaagcaaggacattctaagggcagtgggcttaagataggaatacatgcagagtttatagtggatttagctacagctctagcttttaatacacaggagcgtatgttattgatagttcaaaataatggagctatagaaaatatacaagatgatgctatggttgaaattccatgtatagttggaaaagacgggtatgaaccattatcaatagggaaaataccaacattccaaaaaggtttaatagaacaacaattagcagttgaaaaattagtagttgatgcttggattgagaagtcttataataaattgtggcaagcacttatgctatctaagacagttcctagtgcaacagttgcaaaagaattactagatgatttaatagaagcaaataaaaattattggccaaaacttaattaagaataatatatttttaaagttcctacagtttagtacatagcctagttaatgtatttgtagggactttatttatttacaaatgagatacaagtggcaaacatagtgtattttgcagttaggaaagtaggtttagttacttgttagttggattaaatttaggtacaataatttactatcaatcaatagaaataaccagagaagttgcataataaaaaatttacacttttaacaggatttatgtaggtgtttatagaaataaataaatatgtacataaatacataattatttttaagtctaaaatacaagaatggagagatggctatgaagtggagagattatgctgatgatgtaaatttatttgaggattttgataaaactatcaagcctctaactgacgaacaaagaagaaaaaatataaacactttaattgcatatttttcaaaagaagttccttctaaaatatacaatttatcaaatgatgaaattaagcctagagatatacttagaggacttttgaatgtatatccaccaaaagaaattgctccagagatacttaatatgttacataatttattgttgattgaatgtgaagaaagagagttagtagatgtaaatgatatagaagaagtagaggaagggattgccatatggagaggtaatataacgaatttaagagcagatgcaatagtaaatgctgcaaataacaagttattagggtgtttacaaccattacatctatgcgtggataatgagatacattcatgcgcaggtcctagacttagagaagattgtgacaaaataataaaaaaacaagggcatttagaatatactggagatgctaagataactagaggctattgtttacctgcaaaatttgtagtacatactgttggacctattgtatctggtggtcagccaagtaaagagcaagaaaagcaactgcttcattgttataaatcatgtttaaatacaataaaagaaattgatgaaataaaaaatattgttttttgtggaatttctacaggtgtatttggttatccaaaaaaagaggcagctaatcttgctgtaagtagagttagactatggctaaaagaaaatcctgaaaaaaatttaaaagttgtatttaatgtgtttactgaagaagaagaagagaaatatagaagaatatttaaataatattatgtaacagaatcctaaaaatacttattatataatacaaattcattgtataagataataatttacaagtagtaaaaattaataaaatataatttgtatttttaataaataagtaggtataatagaaattataagaatagtataatcaattatgctattacttagaaaatataatataggaaaattgtatggtaaataaatatgaaaaatagttttaaaaattgtattagtttaagaaataaatttataattatatcaattgtgtttctattaatcctattaattgtatcttatatatttggcaaattagtgtataatagttcggttggtttagagcagttaataaaaaacgaagatatagtaaaaatattttctgagagaaaagataaaccactggagaaattaaaaaactacaagacatctgaattaatgatacaaagttctaataattacaagcttgaaagtctttttataacttcaaatataaagacaagagatactatgatacttgttcatggaattggaagtagttactatgaaatgttaaaggtagcatatagatatttagataaaggttataatgtattagtttataatcaaagaaatactggtaatagtggtggagataattacacatttggtctttatgaaaggtatgatttagatagtctagttaaatttgtaaaaaataaatttcctgaaggaagattaggagtgcatggattttccatgggagcagggacagctgctatgcattcagagataaattcaaaagatgataaggtcgatttttatatactggattctccttattctgaaatgaaagatgcaattagaatgggagtactagaaaaacgaataccagatatattaatcaattatgtggtgatttgtggagatttatataataagtttaaatctggattttggtacagtgatgtaaaaccatatgagtcagttgagaaatctaatgtacccatactgtttatacatggaacaaaagatactgtttgtaattatcaaaatagcaagaaaatgtatgatttagttaaacatgataaaaaagacctatggcttatagaaggtattggtcatgttgatggatttgaacatgatagtacagtatacttcaataaaatatttaaatttatagatagtaatgttttaagtgataaaagttaattgaatattagtagcttatttatttttgtatttattaaaaaatagataggctatttttatgtttaaatataagttttgtttagtaatgtgaattaatttctagtaaaaatgaaaataactaccaattaaattcatttatacctcaaataaaagagttagtattagattacaatcaaatctaaagaaaagagaggtagtatatatgaaaaacaaaaataataaagataaaaacatgttgaatattaaagtattgagagttctaggagtgctattaatactttttgattatacgggtgatactttgaatttttataatttcttcgcaaagccattagtatcgggtaatttatataagacaacaggtactgactgtattgtatttttattatttattgtagagtgtgtatacctagtgggaagatatatattaaaagttaagataaattggagtgagattattgaaaatgagaaaggtaattttataaataacttgttggttgaaaaaatacaagaagaaagcaacattgtatataatttattaaactcatatgtgttgccacatatatataagaaagcaagggtgttgatgtttaaaacatatcatatgttaatctacattaaagaaaaatactattatgtaaatatatattaatataatatgattgcacaattaattatattatattttgtattggatgataaaatgaaagacataaattttttgagacactaaaatcgcaatttatttcgtgtttaagttataaattttgtgaaaaattataaatcttataaaatagattgcgattttaatcttaaacttttgctatagtttttccagtatcagttaaatcatatccgccaagaccttgaagttcagctttaaactcaggagagtttattatgttaattatagtttggtaaactggattttgtaagtcttcttttttaataactaaatcatagcgctctttgtgaagaggaataaagtcgatattatttacttgtaaagcagctttttcatttcccaaaccaacatcagctattccacgagaaacagtacttgcaactccaagatgtgataattcttcattatcataaccttttatatgtttaccattaaagtttagaagtctaagtttaccatctagtaaaaccctagttccagaacctttttccctatttacaatggttatacttggttttgttaaatcctcccaggttgttatctctttaggatttcctttagcaacatagaaaccttgcattctataagctagatttataagtacacatggtattcctggcaatagctttttaacaaaagtgctattatattcatccgtttcgaaatcccatagatgggatgatgctatagaaactctgccattatataactcatacaaagcattataactacctatataagagcgaaatgtacttattccatccaattttttttcaacagacctagctaaaatgtctaatattacatcttgaccagaaataataattttgaaattattatttatatctatatttttattgttgaaatgtgtatcctttactttaccagttttttggctgttgatatattcttcaacatctttagtatcaactcttatttttttccctactttataagaaggaagttcacctcttttgattaattcatatacagtattttttgttatctttaataattcagctacctcgacaggtgtcaaagatgataatgagtccataatccacctccatataaggttattttaacattaaaaaaaggaaaatgtagcaaaatatttaaaagtagtgtaaataaattacttgaaaatttattatcatgtatatataattaaactatatataacaaaacatgataaaacataataaaacatattaaaatgtgtatcaaatttacaaaaagggagattgttatgaaaaaaatattgggaatattaggattagttgcatgtttaactttggggacagttgggtgcaatagtaatgaagacaaaacagatgatggaaaacaagaaaaaacaactaaaagtagtgattcagtagagttaaatatatcggctgctgcaagtttaaaagaagcaatggcaaagattgaagaagaatataaaaaagttgattcaaatgtaaaacttacagttaactatggagcatcaggctcattacaacaacaaatagaacaaggagcaccttgtgatttatttatttcagcaggtcaaaaacaaatgaaagctttggatgaagagaagttattagtttctgatactatgaaagatttagtaaaaaatgatttagttcttatttcttctgctgacagtagtgtatcaggtatgaaagatttgactacagataaagtgaagaaaattgctgttggtgaagttgaaagtgttccagctggtaagtatgcagatgaggtgttaactaatttaaatttaaaagataagttaaaagataagctagtatttgcaaaagatgtaaaagaagttttagcatgggtgcaatcaggaaatgctgatgttggattcgtttacttcagtgatactgtcaataatgataagataaaagtagttgaaaaaacagacgaaaaaactcattcacctattacatatccagtttcagtaattaaagctagtaaaaacgtagatgctgctaagaaatttgaagaatttttattaagtgagtcaggacaaaagatttttgaagaatttggatataaaaaagtagaataaacttataaataaattatgtgtaattaagtataaattatatataaataaatgaaaattgaaaataattgtgtattataataaaatggaaatagtgaaattaatagagttattagtttcactatttccatttaaaattaaggagggaaagatgggaacagattggtcacccttatggatatcacttaagacatctattttgtcaacaataataacttttgtaataggaatatttgtgtcatatattatggctaactatagaggtaagtggaagggtcttatagatggactatttacacttccactaattttgccaccaacagttgtaggtttctttttattattactatgtgggaagaatggatttataggaaagtttttattaaatttcgataggactttaatatttagttggacagcaactgtaatttcagcagtagtggtgtcttttcctatgatgtatagaacttcaaggtcagcttttgaacagattgataataatatgctgtcagctgctagaacattaggtcttaatgaatggaaagtattttttaagattgcagttccattagcatggcctggaataattggtggattggtgctgtcgtttgccagagctcttggcgaatttggtgctacacttatgatagctggaaatatacctggaaaaactcaaactatgccaatagctatattttttgctgttgaaggcggagatatgaataaagctatgatgtgggttatgattattgtagcaatatctatagcaatgattttattactaaattattggtcggaatttcagcaaaaaattataggaaagaggtgtggatagttgagcttatacgtggatattgaaaaagatttatcctcttttaaactaaaggtagaaattaaacaagaaaaaggtactctggggtttttgggggaatctggttctggaaaaagtatgacattaaaatgtatagcagggcttgagaaaccaacaagaggtaaaattgtattaaatgatagagttctatttgattctgaaaagaagataaatttatcaacacaagatagaaaggtaggatttttatttcaaaactatgctttgtttccacatatgactgtaagtcaaaatatagaacttgggcttttaaaactaagtaagagtgaaaaaaaggaaatagtagcaaggtacttagatatacttaaattaaatgggtttgaagggagatatccttggcaattatctggtggtcaacaacaaagggtagcactagctagagcattggcaacatctccagatatattacttttagatgaacctttctcagcactggaccatcatttaagaagtaatatggaaaaagaacttatgaatatgttaaaagattacaagggagatatactatttgttactcatgatattgaagaagcttaccgagtttgtgatgatattatagtgtacaacaaaggagaaggtcttccaaagagacctaaaaaagagctctttgaatctccaaagtaccttatagaagctaagataacagggtgtaaaaatatatccaaattaaatagactggataaaaatactatttatgctacagactggggatgcgagttgacattaaatagagaaataggtgataatatagaatatgtgggaatcagggagcatcatattaaggtcttggattctaatgaagatttaaatgaaaagttatgtttcgaattgattaacattgtagaaaatccttttacatatactatatatgttagaaaaactgatttatctaacgaatgtgtacctattcaaatagaattggaaaaaagtaaaatgagatttaagaaaggtgacagaatatatttagattttccacaggaatatttattttgctttagatacaattataacaaaaaggagtaaactatatgactgaaaaagaaaaaatgttgtctggaaaaggatactatgcaaatgatgaattgttagtaaaagaaagagagtattgtaaaaaattaactagattgtttaataatactttagaggatgaatatgaaaaaagagaagatattttaagacaactatttggttcagttggcaagcaaataaatgtagaacaaaacattaggtgtgattatggatataacatacatgtaggcgaaaatttctttgcaaattatgattgtatttttttagatgtatgtaaaattgaaataggtgacaatgtaatgttagctccaaacgttcaaatctatacagcctatcatccaattgatgcacaacttagaaattcaggcatagagtatggttctcctgtaaaaataggtgataatgtatggataggtgggggagtaatcataacaccaggaattactataggtgataatgtagtaataggtgcaggaagtgtagtcacaaaagatataccaccaaatactgtagctgttggaaatccatgtagagtaataaagaaaatagaagaataaatatgattgtataaagtttatacaagtaaaatttatacaatcatattaagagcatttacatataatctttaaatagataatacattaaaataaaaatatatgcctgtttctataaattaatttatagaaacaggcatattaatcgtatatagaaaatatctttctattcttgtttagtctttacataagaaatattttcattagaaggtttttccatacctaaagcttttaatatatcttcattaacaatgatatctgtatcatctgatgtagccacaggcatatcagatactgattcgccatttaaaattttaactgccatttcacctgttttgtaacctagtttttcgtagttgataccttgacaagcaagagcacctttttcaactggcccagattcagctgctataacaggtattttattctcagtagctattttagagactataggcatagaagaagccactaagttatctgtaggaacatataatacgtctattttgccaactaaactagaaataccttggttaacttcatttgaagtagttatacctttttcaacaactttaaatccatttttagatgcatattcttttaaagcatcaacttgaactttggaatttacttcactagtattgtacataactcctatagtttttgccttaggagcaaatattttaagaagttctaaacctttgtctacagaaacaaaatctgatgttccagatacatttgtgcctggcttttcaagagttttaactaatccagcagcaacagggtcactcacagcagtaataagtataggtatatctttagtagcattaaatgctgcctgagctgatggagtagatatagcaaatattaagtccttcttatcagatgcaaatttactcgcaatactttgtgtagtaggcatgtcattttgagcattttggaagtctatatcaatattttctccatctttaaatccgttcttttctaatgcttttacaaaacctatcctagtggcatctaatgctggatgttcaaccagttgagttataccaatttttttaacttctttacctttagaattactttcttgttttgaattaccagagtctcctccttgtgaacaccctgtaagcatagatatactaagagcaccagctaaaatcaaacttgccaatctttttttattaatcatttttatatccccctcaaaaatttattattatatatgttcatatattcatatgaattattacaaagtaaccataattattgtaattttaactttattttaaagccgagtttaatacaatagatatattattttaaactgcatattcaaatttttctaagatttcttcaactgttaattgttctttttctttaccttttacatctaatacaacttcacccttatgaagcattatcaatctatcaccataatgaagagcgtgttttaagttgtgagtaaccataagtgtagttatatttttttcccttacaatcttattagtcaattcaattacttcatttgatgtttttgggtcaagtgctgctgtatgttcatcaagtaataaaactgatggacttgttaagcacgacataattagtgataatgattgtctttgacctcctgataaaaattttacttgaacatcaaggtatttttttaaatcaagagatacaccttccaataaattttctaagaaatctcttttgtaacgaagacattttcttagatttaatagttttcctttgttaagagctaaagacaagttttctctaacagtcatagaagggcaagttccaagacttgggtcttgaaaaactctacttactatttgagttcttctgtgttcagctaaattagacaagttatgtttatttaataatacttgaccagaagattcttttataagcccggatattatatttaataaagtagatttaccagttccattactacctatgatacttacaaattcaccatcttctatatcgattgataaattttcaaagatagtattaggttcaccatatggattagggaaactctttgaaagatttttaatttgtaacatctacaacacctcttttttctgatttatttttggtactagctttgcatttgttttttttagtgaaatatttaagttaccagtagctaggaaagctattataactatggcagttattagttttaagtcagttgataacattcctaaactcattgcaaagtatatagtgaattggtatataaaagagccaacaattattgcagtagtatctttgataaaagtaaatttcttaaatagtgtaataccaattatgatagaggcaattccaagaactaaagttcctatacccatatttacatctgagaatcccaagaactgagccataagactaccagataaagctataagtccgtttgaaatcataagtcctagtatttttatagaaccgatatttatacccagagatttaatcatttgagagttatcaccaacaccttttaaagtgtatccaagacctgtttttaggaataaatctaaaaggattttacagatgaatacaaaagctaaggctaaaactataggagatatttccccattgaataagtgtttaaagctaaatagaggaatatttgattttcccattattcttaaattgatagagtatagcattcccataactaaaataccagaaagtaagttagatatcttaaacttaatgtgaagaatccctgtaacaagaccagcagtacaaccacataagatagccattaaagttgctactacaggagaaataccattagtaagagaaaatgctacaatagaagcacccattgtatagctaccatcagcagacatgtctggaaaatctaggattttgtaagttatataaacccccagtgccataatcgataaaattaaactttgcgtcattacagatataatacctgacataaataaaacactcctttgaaaatatttttataattttaattatttgctaattttgtgtataaaaaaaccacatagtgtacaaaactatgtggtaaaaacacgaataagccacatagtttaatctatgtggctcttatatagttaaatgaaaactttataaacaatatagccaacatagatacaatcccaaaattttaatagtcttaaggggtctgtatctatgttaaaacgtaggtacaaaccctaaaaatagtggctataataataataatattttctattgtttaataaagtattcataattatctctcccttttaatattttaattagtcagaaaattatatgtattctcgacttgttataaattataaattatacaataataaaagtcaactgctaaatttaattaaaatactaaataatgtatactcagaatacttttaaattaatgtattgtttgcaaaaaacgttatcctaagttataagtgaatgtggaaattttatcaaaatatttactaaatatggaataactagacatgtatatcaatcaaatatcataaaaaaaagctgtctggagaatattaaaattcttttggacagctcaagtagtgattagaaagttatataactttcataatcagtcgtcaatatagacgacttttatggaaaatgaataactttatatgcaatattcaaattgctacaataagcacaattttcaaagggttagggtggataagagtacttattatataaagttttcatattacctacttcatattacctattttttgaaattaataagttttattttgcagattttgcattttcatctgactttatatactttatattatctgctgataacttttgcatgtcaagtgcttttagtgtatcttcgttaattattatttcagtttcatctaatgtagtaactggtatatcgccaacagattttccttctaatacttcaatagcaagttctccagccttataacctagtttttcataatctattccacaacaagctaaagcaccagaagatacagaaccttcttcagaggctattataggaatcttgttttcattagcaactttagaaactattggcatagaagaaactattaaattgtcagtagggacatataaaacatctattttgccaactaaactagaaatagcttggttaacttcacttgaagtgctgattcctttttcaactacttcataattatttttcttagcataatcatgtagagaatcaacctggatttttgaattaacttcactagtattgtatataacccctattttctttgcttttggagtcaatgttttaaccaattctaatgttttatcaattgaaagataatcagatgtaccagaaacatttccacctggtttttcaagagatttaacaagtccagcttctacagggtctgtaacagcagtcattattattggaatatctttagtagcattataagctgcttgtgcagatggagtagatatagcatatatcaaatcttttttgtcggatacaaacttactagcaatactttgtgtagtaggcatatcattttgtgcattttggaaatctatttttatattatctccatctttatagcctttatcttcgagtgctttgatgaatcctttctttgctttatccagagacggatgttccactaattgactaatacctatatttttttgttttttgctatctgtttttttattttcatttgaagcattggagccatcattttgagaacatccagtaagcattgatacaccaagtactcctgctataattaaacttaatatttttttactttttatcattttattttcctcccttaaaatttaataattatatttgttcatatattcatatgatagattataaatatttctgattaaaactaagattttaatttcttatactgcatattcaaatttttctaagatttcttcaactgttaaattttctttttctttatcttttacatctaatacaacttcacccttatgaagcattatcaacctatctccatattgaagagcgtgtttcaagttgtgagtaaccataagtgtagttatatttttttctcttacgattttatctgttaactctattacttcatttgatgtttttgggtcaagtgctgctgtatgttcgtctagtaataagaccttaggacttgctaagctagacataattagtgatagtgattgtctttgacctcctgaaagatattgtactttaatatctaaatatttttttaagtccaaagaaattccttcaagtaagtgttccaaattattcgttttatgacgaagacatttttttaagttcaataatttccctttattaagtgctagagataaattttctctaaccgtcatagaaggacaagttccaaggcttgggtcttgaaaaactctacttactatttgagttcttttatactcagctaaatttgttatagtagtactatctaaagtaatttgaccagaagattcttttataagcccagatattatatttaataaagtagatttaccagttccattactacctatgatacttacaaattcaccatcttctatatcgattgataaattttcaaagatagtattaggttcaccatatggattagggaaactctttgaaagatttttaatttgtaacatctacaacacctcttttttctgatttatttttggtactagctttgcatttgttttttttagtgaaatatttaagttaccagtagctaggaaagctattataactatggcagttattagttttaagtcagttgataacattcctaaactcattgcaaagtatatagtgaattggtatataaaagagccaacaattattgcagtagtatctttgataaaagtaaatttcttaaatagtgtaataccaattatgatagaggcaattccaagaactaaagttcctatacccatatttacatctgagaatcccaagaactgagccataagactaccagataaagctataagtccgtttgaaatcataagtcctagtatttttatagaaccgatatttatacccagagatttaatcatttgagagttatcaccaacaccttttaaagtgtatccaagacctgtttttaggaataaatctaaaaggattttacagatgaatacaaaagctaaggctaaaactataggagatatttccccattgaataagtgtttaaagctaaatagaggaatatttgattttcccattattcttaaattgatagagtatagcattcccataactaaaataccagaaagtaagttagatatcttaaacttaatgtgaagaatccctgtaacaagaccagcagtacaaccacataagatagccattaaagttgctactacaggagaaataccattagtaagagaaaatgctacaatagaagcacccattgtatagctaccatcagcagacatgtctggaaaatctaggattttgtaagttatataaactcccagtgccataatcgataaaattaaactttgcgtcattacagatataatacctgacataaataaaacacccctttgaaaatattttaaatggttttttaaatttggttttaaaaaatgattttgatataaaaaaaccacacagtatatataactgtatggcaaaaattcgaataagccacacagtataatccatgtggctctatattatgatgataaaataaaaactttaacaacaattactatagccaacatagatacaatccttaaaaatcataatcctaaggggcttgtatctatgttatgacaatttgtcttaacttaggtacaaaccctaactaaattggctactaaaaaatcgtacttgtttgtttaataaagtcttcatatttacctctccttttaatttaataattttgaaaattttgttttctgttttgtatagtaattagtttaatacagtaaaaaataaaagtcaactataaattttgaaaaattatcaagttatcagaaaattgagtttaaataaaaaaatttttacatgtagaatatagttatattcttaattattgtttttttataaaaatgaaaaatataaataagtcataaaagattataaaaataaagagatatttagataattagtgtaaataggttttaaatcaacataataacttaaattatatggtataataaattaaataattgttttaattcaaaattttttgttattttaaattatttcaaaactcttagttttagtgattttatttatgatatttatgggattaaaagatttcaatagatatttttggtaagtatttaagaagtctttaactttataggagtgataatttatgctaataggtacatctaaattaagcagaaatgttgatactgcatgtgtagaagaagtagggattccaatgattgtattgatggaaaatgcggttatatctgcaatgaaaaatatggatatagacatgtataatagttatacagttgtatgtggtgttggaaataatggaggagatggtcttggaatagcaagacatctaaatacatatggaaaagaagtaaacgtatttttagtaggtaatcttgaaaaactaagtgaatgctctaaaataaattacaatgtacttttaaatatgggaattaatattataaatattaataaaaatgatttaagtgaaaaaaattatggagatgaaaatgaagtagataaaattattaaagttgagaaacaaaatattataaaaaataaaaatttaacaatttttaaagatagagtatctaaaagtgatgttgtagtagatgctatatttgggactggattaaaacgtgatataactggtatttttaaagaagttattgacatagtaaacgataatagcaaaaatacatattctatagatattccttcaggtatagatagcgataatggaaatgtattaggaacttgtattagagcaaacaaaacgattagctttgagttttataaaagaggttttctaaactatgacactagcacacttataggtgatgtagttgtagaaaagataggtgttccagattttattacaagaaaataccatgatgaagagttcataactgataagacttttgtaaaaaataatattagaagaagagataagcatggttttaaaagtgattttggaaaagtatctatagttgcaggttcaaaaggattttatggtgcaagtttcatagcaactgaatctgctgttaagagtgggagtggacttgtaacattaattagtagtgaagatgtgcaagaaaaggtatctattagacttacagaagcaatgactttaaattttgaagaagaaagattaaataaattacttaattctagtgatgcaattggttttggtccaggtatgggagataatagtcaaacatttgataaattacttaagatagtagaaaattctaattgcccaatagtattagatgcagatggattgaacgttatgaaggacagatgttataagtttttagaatggaaaaatagatttgtaattacacctcatttgggagaaatggccaggttgacaggagattcaattgggtatataagagaacatagagtagatgttgcaaaagaatttgctcaaaaatataatctggtggtgcttttaaaaggttatcaaactgtcataacagatggtaaaaaaacatatataaatcctacaggaaatagctgtatggcaactggtggaatgggtgattgtttgcttggaatgattacttcatttataggtcaaggtatggatatattggaagctacagttagtggagcatatatacatggctatataggagataaattgagcaaagcaatgtatacggtaaatgctacggatttaataagtaacatttcattaacaatgaaagagttgttggatatataattgattaaaaaatagctacgcacacttgtgactttagtcatgagttagtagctaaaatagtcagcatatagggaaacctatatgtagagataggatagaacctatccaatactacttgaattgctaaaatcccctaaagctaactaaactaaaacataaggatgaaataaacctaagtgtgaaagttacgaaagtagaaaaaattggttagatggtataaggttaaatcctaagtactttaaaatgggcaatcagcaggtaagctccgaataggagaaacttcaacgactattcctcttgagggaagtacactacaagttatcggtagtggaagtggatagaccttagcggataatgccgaaggataagatatagtctgtgcttacatgaaagtgtaagaagttcataagagaactgcataggtagtagcgaacttatgtgaacgacaacctcaaaaatgataaaagttaagacttacggttcttaaatatgttatttaaaaataaatataaaaaaccttcaaaatacttgttttaagtaattgcatattttaatattatgataggtgatgaaaaatggaagttactcatggtagaggatatgcatataatatgtcaaatatagacatccagtattatggggagacatctttggaatcctagttatttcgttgccactgtatcagaaaatacagaggagcagataagaaaatatattaataatcagaaaaagcaagtaaagtgaggtggcagtagtggaaaaagcttataagtttagaatgtatccaaataaaaaacagcaagagttaattaacaaaacttttggatgttgtagatttgtatataataagtatcttgctaaaagaatagaagtttataaaaacgataaagaaacttttacttataaacagtgtagttctgatttgaccaatttaaaaaaagaattaaagtggcttaaagaacctgacaaattttcactacaaaacgccttaaaagatttagataatgcatataaaaaattttttaaagaaaaagcaggatttcctaaatttaaatcaaagaaaattaatagattttcatataaaactaattttacaaatggaaacattatgtattgtggtcaacatataaaactacctaaacttggtatggttaaggtaagggataaacaaatacctcaagggagaatacttaatgctactatatctaaagagccaagtggtagatattatgtatcattatgctgtactgatgtagatattgaagtatttgaaaatactaacaatcagataggtttagatttaggaattaaagaattttgtatctcaagttgtggagaatttatagaaaatcctaagtatcttaagaagtcattaaacaaacttgctaaattacaaagagaattatcgagaaaaacaatcggtagtttaaatagaaataaagcaagattaaaagttgcaagacttcaagaacatatagctaatcaaagaaatgattttctacaaaaactatctactaaattaataaaagagaacgatattatttgcatagaagatttacaagtaaagaatatgattagaaatcgtaaactatctcgcttaatttctgatgtgtcatggtcagaatttgttcgtcaattagaatacaaggctaattggcatggtagacaaattgtaaaggtaggtaaattctttgcaagttcacaaatatgcaataaatgtgggtataaaaacgaggaagtgaaggacttaaatataagagaatggatttgtcctagttgtaatgaaattcacgatagagatataaatgcaagtataaatatattaaaagaaggattaagactaataacgattcaaaataaataacttatgtaagaaccgtaggaactacggggatagcctgtggagaattagtaagacatatgttagtatgcaaaattctatgaagcaggaaccctgtgactttagtcatgggaggttcagactactttgtaacaattttaacaaagtatgttgatataatactattaaattaatcttagattagtttattctattgatttgtagtttaaatttatattcaaaaacattgtataaacatataatttatatagggttttataattcatatgaaaagagggtagatagtatgaagttaatatggttgatagtagcagtcttatttggaatagcagaaatgttaacaccaagcttaacattgatatggtttagtgtaggagctgtaatacttatatttttaagtagctttatagagagtattttcttacaaattttaatatttgcagtaatttctatagcaatgttagtcgtagctactaaaaaaatagtaaaaaaagataaaggctataaatctaacactaatttacaagcaatgatgtctaaaaaaggtattgttacagaagagatttctccaaataacacaggtctagttgtagttgaacatgaaacatggacggctatttctatagatggtgaaaagatagaaaaaggttctacagtagaagtattaaaaattgaaggggtaaaattagttgttaaaaaagtagacgccacagttaatgtgacaaaccaatagaataaaggaggatttatagtatgggtactaaaattgttttaagtattgtattaatagtagtagtcgtagcaataagtttaacgtgtataagagttataaaacaatctaaagtaggtataataatgagacttggtaagtttcaaaaagtggctgaaacaggtgtacatttcttaataccatttttagataaaatggcatatgtaattgaccttagagaaattgtaatagattttccacctcaaccagttataactaaagataatgtaactatgcagattgatacagttgtatattataaagttacagatccagttagatatgtgtttgagatagctaatccaatagctgctattgaaaatttaacagctacaacactaagaaatataattggtgaacttgatttagatgaaacattaacatcaagagatataataaatgtaaaaatgagaactatccttgatgaagcaacagataaatggggtataaaagtaaatagagtagagttaaaaaatataatgcctcctcaggatattcaagttgcgatggaaaaacaaatgagagcagaaagagaaagaagagaggcaatacttcaagcagaaggtaataagtcagctgcaatacttcaagcagaaggtgaaaaacaatctgcgatattaacagcagaagccaaaaaagaagctatggtacgtgtagcagaaggtgaaaaagaatctgctatattagtggcagaaggtgaagctgaagctataagacagaccgctattgctaaggcacaaggtgaggctgaaatgataaaaagaactcaaatggcaacagcagaaggtttaaaattagttttttcagcaatgaaagaggctgatatagacaataatattctagcattaaaatctatggaagctcttgaaaaaatggctgaaggtaagtcaacaaaactggttttaccttcagaagcagttaatttcctaggaacattcaaaggaataaaggaagttatgagtgatgataacaaagaagtacttgatataaaagaagttttaaatgataatgaatcattaaaaaaataaaagagttttgttatcataggaaggatatggaaattaaaggtcgaattaattaaatatagcacaaaaatgcacgttgaaaagaagaggacttataaatttttaagtcttcttctttgtttttattagaaagatgaaattataaaaatgaattaacagaatctttatacaatttatcctttactaatgtaaaaagtgttatataatattatataaaacatatagcaaataagcatggttttagttagtctatttatattattaatatatatttataaaaatataaacattaatactaagaaaactaataaataatttaaaagtttatatccttttgtttaaattatagacaaagaagtatcaattaaaaaataaagttgattaataattacttgattttctttggataattatttaacaaatattagattatattttgctattacgaatttaacaaattaaaaaataagcatgtttatatgacacaagggatttataaaaaatgtttttatatttataaaataaaatttgtattattttttaaccgataattgaatattaataaatactatagtgcttatggaaaataatgtatacgtcggtaagttcattatggggtatacattatatcaattgtatagttgatattattttatttttattaaggtattatttaagcaacatttatacacggcatttattgactgataaagtttataaaagtaaaaatgcaattataaatattaattactagatgaggggagtgtcattaaatgaaaaaagagatgttagctatgattttggcaggagggcaaggttcaagattaggtgtttttacaaaaagaattgccaaaccagctgtatcatttggaggtaagtatagaattatagattttgtgttaagtaattgttcaaactctggtattgatactgtaggtgttttaactcaatatagaccgttgatattaaattcacatataggcatgggaagtcattgggatttggacagaataaatggtggtgtctatgttttacaaccatttatgaatgaaaaagaaggaaattggtataatggtacagcacatgcgatatatcaaaatatggactttgtagatacctataatccagaatatgtattgatattatctggtgaccatatatacaagatggattatagcaaaatgttaaaatttcataaggaaaaacgctctaaagctacaatagcagtgattgaagttccttgggatgaagcttcaagatttgggataatgaatacaaatgaagattcaagtatctatgaatttgaagaaaaaccaagtgaacctaagagcaatttggcatctatgggagtatacatatttgattggaaaatgttgagaaattattttaaggaagcagaaaaaaatccagaaataaattatgatgattttggaaaaaatttaatacctaaaatgttagaagataatgttggaatgtatgcttatccatttaaaggatactggagagatgtaggaactatacaaagtctatgggatgctaatatggatataataaaatctccagaaacacttgatttagcagaccctaaatggaagatatatacaaatactatggcaatgcctccacaatatataggtaaaaatgcaaatgttcatagatcaatgatagctgatggttgtagaattttaggtgaagtaggcaactctgtattatcacatggagttgttgttggtaaaggaagtaaagtaattgattcagtaataatgccaaatgttgtaataggtgaaaatgtaactatagaaaaagctatgataggtgagtgtgcaactataaatgataatgttcagataaagaatgtaaataatgaaataaatgtagtttctgagtatgaaaatatcgaacctagatgcgtattaatagaaggaggtctttaagatgagaaatgaatgtttagggataataaatttaaacaaaaaaggagacccagcaataaacaaacttaactatggaagaccaatagcatctacaccaatagctggaagatatagaataatagactttgctttatctaatatgataaattcaggaatcactaaagttggaatattcgcaaaagaaaaatacagatcattgacagaccatataggtagtggtaaagattgggatttaagtagaaaaaaaggtggcctatcaatttttagtccagaaaacactaagtatagaaatacttactcacatagagaaggtgatatatatactatcttagctaatctagattatatagaaaagagtgaagaagaatatattttaatagctccaagctatatgctatgcaatttaaattattctcaagcattggaataccataaaaaatctcataatgatataactataatatataaaaatgtaaataatgcaaataaagattttgctggtaacttaacactaaatttagatagtaacaatagggtaataaatgtaggaaataatttaggcaaattccctagagcaaacatatgtatggagacatatattatgaagcgtgaagattttgttgaatgtatatataacattgtaaataaaggcagttattgttatttagaagaatttattattgaagaagcagaaaatatgaaaataggagcttatgaatatacaggatatctaaaatgtgtaaattctgttgaatcatattttgaaatgagcaaagatttattaaatttagaagttgcagatgaattattatactctgaaagaaagatatttacaaaagaaaagaatgaatcacctacaatttatacagatagtgctaaagtagaaaatagctttatagcatctggttgtttaatagaaggtactgtaaaagatagtatcatatttagaaaggtaaatgttgaaaaaggaacagttatagagaactcaatagtaatgcaaaattgtgtaataaagtcaaatgcaaaactatataatgcaatattagataaaaatacgagtgtatcaaatgggaaagaattaagaggagatgaaaaatatcctcttgtagtggaaaagaatacaaatatataaataaattttttagaagggggaatgactaatgaaggttttttatgtaacagcagagtgttggccctttgcaaaaactggaggattaggagatgtttcttatgcattgcctaaagaattaaaaaaagaaggtgtagatgtaagggtaataatgcccaaatattcaactataccaagttatttaaaagatcaactaaaagaaatagctgtgtttagtgtacgtgttggatggagaaatcaatactgtggtcttttagaaatggaattggatggtgtaaaattttactttatagataatgaattttattttagaagagaagatgaaagaaagagtatctatggatatggagatgatgcagaaagatatactttctttacagatgcagttttagaagctataagtagaattgatttttatccagatgtaatacatataaatgattggcatacagggatgttaccattaattctaaaagaaagatatgcaacccttgaggggtataaaaatataaaaactatgtatactatacataatctccaatatcaaggtgtatttgataagcatgttttatatgatatattggacttaccacaaaaatactttgataatagagatatagagtattatggctcaataaattttatgaaagctggtataaattttgcagataaaattataactgttagtcctacttatgcaaatgaaatacaaacatctttttatggtgaacaattagatggattacttagaaaagagtcaggaaaattaaaaggtatattaaatggtatagattatgatttaaacgaccctgcaaaagataaagatatatttgttcattatgatgtagactcaattgacaaaaaagtagaaaataaattgagattacaagatatattgggacttaaaaaagattcatctattccgttgataggtatagtttcgagattagtttctcaaaaaggatttgatttaatagcatacatgatgccagaacttatgagagaagatttacagattgtcgttttaggaactggagaacatcaatatcaatcaatgttcaactattacgattctaatttttcagataaagtatcagctagaattacttttaatgcatcattggctcaacagatatatgctgcaagtgatatgttcttaatgccatcattatttgagccttgtggtataggtcaaatgttagctatgagatatggttctttaccaatagttagagagactggagggcttagagatacagtaacaccttataataaatttactggagaaggcaatggatttagttttaaaaattacaatgctcatgagatgtttttctgtttgaaaaatgcaatcaaagtatttaaggacaaagaaaaatggattaaattagttgaaaatgcaatgaaaacagataatagttggaaaaaatcagctaaggagtatatagaaacatatagagacatatgtgattaaaggagtggtttttttggtaacaataagcaaaaagaaattcaagcaaaaatttgaagtaaaaatgtatagcttatatgcacaatctatcaaggaagctactgatgaacaattgttaaatgtattatgtagtctattgaaagatgagatagcaaaaaaatgggttgctacaaagttagataagaaaaaagaagtttattattttagtttagaatttttaatagggagacagttaaaatctaatttattaaatttaaatattgaagaagaagttagagaaggtttatctgaattaggaatcaacttggatgatttaattgaagctgaagtagacccagccttaggaaatggtggacttggtagattagcagcttgctttttagattctatggcatctttgaacataagtggtcaaggatatggaataaggtataaatatggtctgtttgaacaaaaatttgtaaatggttatcaggtagaagtgcctgataactggcttacagaaggacgatatgcatgggaaactgtaagaccaaatgaagcaacaatggtgaagtttggtggtgaggtagaattaatcaaggaaggtagtcatttaaaagtaattcataaaaactaccttcctgtaatggcaatgccttatgatataccaataatcggataccaaaaccaatgtataaatactttaagattgtttaagagtgaaataccaaagagagattttggtgaacttacctcaaatgctctaaattattctggtagctatgaagaggctttaaaacataagtattatactgaggaaatatcacaggtattatatcctgatgattcaaactatgcaggtaagttgttgaggttgaaacaagaatacttttttgtaagtgcagggatacaagatataataagaaaatataaaaagaacaaattaaatattgataatttattcgataaggtagcaattcatataaatgatacacatcctaccttatgcataccagaacttatgagaattttgcttgatgaagaaaatttatcttgggatgaagcatgggaaataactaaaaaaacagtgtcctatactaatcatactataatgtcagaagcaatggaaaaatggcctgtaagtatgatgaaagaactattaccaagaatttatatgataatagaagaaataaatagaagatatgtagaggaattaaataataaaggatatgagcaggatagaataaaaagaatgagtataatagactgtgacaatatcaatatggcaaacttatgtattgtcacaagtcatagtgtaaatggagttgctaagcttcatactcatattcttgaaacagaggtattaaaagatttctatcaagatgaaccaaataaatttaataataagactaatggaattgcacataggcgatggcttataagttcaaatcctcaacttagcaatttaattacagatttaattggtgattcatggaagaaggataccttacaattaaaaaatattgaaaaatttaaaaatgattcctctgttttacaaagacttgatgatataaaatacaataataaagcaaatctagcaaagtttataaaagataaatacgatttaaatgtagacccaagttcgatatttgatgttcaagttaagagattgcatgcgtataaaagacagttactgaatatatttaatgtacttcatatgtatcatgaattacttgataatcctaatttgaatcttgacccaagaacttttatatttggtgcaaaagcagcaccaggatattatttggctaaatgtataattaaatttataaattctgttgcaagtactataaataatgatgttagagtaaaggacaagttaaaagtagtatttttagagaattatggagtatcattagcagaaataataataccagcagcaaatgttagtgagcaaatttcaactacaactaaggaagcatctggaacaagtaatatgaagtttatgatgaatggtgctataactttggctacacttgacggcgcaaatgtagagatatgtgaacaggttggtaaagaaaatatgtttttatttggacttagtgcagaacaagtactaaattataataaatatggtggatattcttcacttgacttatatcattctaatatggatataaaaagggtggtagatgatttaataaatggatttattcctaatcttggcgaagaaggaagaagtatttataattcactcactacttacaatgatgagtattttgtattgagagattttgaaaattatggtcaagctcaagcagatataaacaggttatatagagataaagaaaaatggaataaaatgtctttagttaatatagctaactctggatttttttcttctgatagaacaatttctgagtatgcaaaagacatttggtttaaaagggtgtgattaaatgcaaagtgtaatagaatataactcttgggataaaaattttaaggctccgtttggagctttaaaatttgatgaggaattgaccatttgtgttaaagtaaatgagggatacaatatcaagtctatttccctagaaataaatagagaagaagaaatgagaacaataactttaaatgaagaattagataatgataaacttggaaagtgcttttgtggtaagattgaaaagtttgatggtacaggtgtttatttttattactttaaagttgatgttgaaatggatggtcagataaagactttattttatggaaaaaacagagataatggatattcttgtgaatataattatagtgatattaataaatatcaaatcactgtttacaaagattttaaagtaccaacatggtacaaagaaggaatactttatcatatatttgtagatagattcaataatggaaatcgtagtggtaaggttgataatcctaaaaaaaatagtttcatatatggaaattgggaagatatacctatgtacataaaggatagtcaaggggatgttataagatgggatttccatggtggaaatttaagagggataatcaataaacttggatatttaaaaaaattaggtgtaagtatactatatctaagccctatatttgaagcttctagtaatcataaatatgacacaggtgactataaaaaaattgacccaatgtttggggatgaagatacatttaaagaacttattgataaagcaaaagaaaaaggtatatcaatagtattagatggagtttttagtcatactggagcagatagtaaatattttaatatgtatggaaactataatagtttaggggcatatcaatctaaagaatctccatattattcatggtatatgtttgaagaatttcctcaaaagtataaaagttggtgggatgttaagacattgccaaatataaatgaattagaacatagctatatggattatataatatatgacaatgatagcgttataaataaatgggtaaatatgggtattaagggctggagactagatgttgcagacgaattaccaactaagtttataagagagttaaaaaaggaattaaaaaaggcagatgatgactcaattcttataggtgaagtatgggaagatgcatcaaataagattagctatggtcagagaagaagttatttattaggtgaagaattagattctgttatgggttatccttttagaaataacatgttttctttcttaaaaggagaaattaattcatatgaactttgtaatagatatatgcagattaaagaaaattatccaaaagaatcatttaggtctaatttaaatttaattggaacacatgatgttacaagagctaaaacggaattaaatgatgatgtagatttagtgaagcttgctgtagctatacagatgacatttgaaggagtaccatatatatattatggagatgaagcaggtctttgtggaggtgttgacccagataatagaagaacttatccatggaaaaatgaagacgaagatatgcttaatttttatagagatgttataaaaattagaaataagaataaacttttaagttctggaaatacagaatttatatatactaataatgattctgtattttcttttattagagttgatgaaaataatgatagaatgttaattttagtaaatagaagtgaaaatgtggaaagtatatcattatgtatagagagtagttttattgaggaaatacctataaagtatagtcttaaaaatgcaaatagtactatacaaattgaaaataatgagttgaaagtagatttagactctaaatcatttagaatttttagagtaaattaaatatctttttttagaaaaataaatagaaaataaggtgaatgtagaaagagttttgttttatcaaaactttttctactttttttgtataaattatcataagaattttagtgtttcaaaatattacaaagaagtataaaaaatatcataattgtgatattatataaattagtaagataaaactgaactctctaccaaagttgtagggagatttaacttttataatcttaatatggaggaacgtcttatgaaggtagatccacttacaactcaagtatatgactatatatcaaagaaaatccaaaatggagagtatgaagctaatcagagaattactgaatctgagatttgtaaatctatcggagttagtagaacaccagctagagaagcattaactaggttagcaggtgaaaatttactagaaaaaatacctaataagggatttgtagtaaaagaatttcaggaaaaggagaaattagacacctattccgtaattggagtattggatgcgttagccggttcttcagcattacaaaatttaactgaatcagacctagtaaaaatggaagaattaacagaaatgatggcggtctctataaagtataaaaattacaatagctatttaaaattaagtaatgaatttcacgatatatacataactaaatcagataatcaggtgttagtaaatctattgaactctttaagatataattttatgtcaaagtcatatactagtgataatgaagatgagttatataaaatgttgacatacagcaataatcaacatattgaagtagtaaaatttatgagggagaatgatttagaaaatgttgaaagagttttgagagaacattggaaaacgatacctatagcagagatgaaaaaagagaagcttttataaagtttctctttattttttttataattttgttattttactattaaatattaaaggaaaaacaagaataaatttaactttaaatacaaataaaaactctaaggcactacgatagaataatatatttaaattaacatatataaatcaatgaacttatagaattttaatatcataaatatagaatttattttatcaattaaaaaatttaataaattttatattaaaattaaaatacaaaaataggaaaattatttagtccaactaaaccaagaattttgatatatgaaataagaataatataaaagtttagtaataaaatacttataaattaaaaatagtaaactcaaaagcttactaaaactcaaaaaagtaaaaaaagcaaaataataaaaaataagaaagtttataaatactaagttttaaaaaaattaatataaacaacaaaaaaataaaaagtttataaatattgatatagctaatgtatatgtttttgagtaacttcaaaaaaacacttgtaaaaatgctggaatgttaatataataaatatcatgagtttaataaaagtaaaaataaaaaatagaaataataaataataaatattaaaaatatttgaatatagagaggagatgaatttgaaatcatggatagcgagtttgcaaatgcagttgaattaagctatgagtgtgctccattattagagtcgttaaaggaatactcagagaaagatatagcttgttttgatgttcctggacatgtaaaaaatagaggtgtagctatattaaataaatatctaggtgaaagtctcatgaaaatggatataaattcatcaccaactatggataatgtatctgcgccaaatgggattataaaaaatgcacaagatttgctagcacaagcatatatggctgatgaggcattctttataacgaatggcacaactcaagcaatacatgcaatgattttgagtgttataaaaccaggtgaaaaagtattacttccaagaaatatacataaatcagtaataaatgcgttaatactttgtggaggaataccaatatttatacaaccagaatttgatgaaaaactaggtataagtttaaatattactcttgaaaaagttagaacagagatagaaaaagattgtaatataaaagcattatttttccttaatccaacttactatggagtttgtgcagaccttgagagtattatagaactatgccataaaaataatgttttagtgttagttgatgaagctcatggtgcacattttccatttcatttagatttacctccttctgcaataagtttaggagctgacatggtagctgtaagtatacataaaactggaggagcattgacacaatcttcagcactcttattgaatagagataatgtaagttttgaaaaggttcttcaatcaatcaatatgctacaatcaacatcagcatcttatttgcttatggcaagtatagatggtgctagagttaatctagttgagaatggtgaaaagcaactgtcaaaagcattaaatctatctaggtatgcaaaatctaaattgaacaaaattgatggaataaaagttttatctacagaaatattgaaacaaaaaggtgttaaatttatagatgaaacaaaattgtgtataaatgtaaaagaattaaatttgactggatttgaagtatacgatttattatataaaaatttttcaattcaagtagaattgggagattcatataatatactggcacttgtgtccattggaacaaataaatcagatatagatagattagtaaaagcactttctataattgcaaagatttatagaaaagaatcaacattaaatgaatttaatatggttcaaataaatccaattattaaacttaatccaagagaagctttttatgcaccaaaggaaagtgtagaaatcaattcatgtatagatagaatttgtggagaatcaataatggcatatccaccaggtataccgattattgctccaggagaattgataacagaagaaattatggagtatattattttcttaaaaaatagcaatgcgtatcttacagatgtacaagataaaaacttagatagaatactagtaataaaataaattactttattttgcaagggcaagtgtttgttaagtagagtttatcaaatagaacttattaaaagtataaaggagttggggttgaaatgaaatttgaaacactaggaagacatatactagtagaatactataattgtgatgaaaacgtacttaaagacccacgtcttatagaaaattttatgaatgattcagcattaaatgcaaaagcgacaattgtggattctgtattccaccattttaatccttggggggtttcaggagctgttataattgctgaatctcatttgacaatacatacatggcctgaatatggttatgcagcagcagatttttttacttgtggtgatatagacccatggaaaagttttgaattattagagcaacttttaaagtctgaaagaagcgagtctacagaaattccaagaggcttaactacaaaaattaaaaaatattcaaaaaaagatttaggtaagattactcataaaccagaagcagtataaaacatacaagagaaagtgaggattattatatggaactttggtatacagaagaatggacagaaaatgtaagattttctataaaagtaaataaacatctatttgaaggaaagtctcaatttcaaaggatagatgtatttgatagtgatgaatttggaaaatttctaacaatagatggattaatgatggtaacatataaagatgaatttatataccatgagatgataactcatgttcctatggctacaaatttaaacataaagaaagtattagtcataggtggaggtgatggaggtacagtaagagaattaagccgttatcctcaaatagaaaagattgacatggttgaaatagataaaatggttgtagatgtatctaaggagtatatggatatatgctcatgtaaattagatgataaaagagtgagtttatattttgaagatggtgttaattttgttaagtgtgcacatgataaatcatatgacctgataatagtagattcaactgacccaataggaccaggcgaagggcttttctcaactgatttttataaggattgttatagaatactgactgatgatggaattttagtaaatcaaagtgaaagtccgtattttgactttaatgctaaagagatgaaaagagctaataaaaaattaaaacagatatttccaatatcagaagtttatcaagcacatataccaacatatccatctggtcactggttgtttggatttgcttcaaaaaaacttaatccagtaaaaaatcaagatagaaatggatgggagaaattaagtttaaaaactaaatattataatagtgatatacatttaggttcgtttatgttacctcaatacgtgaaggagatgctagatgaagaataatttctatcatatgaacacttttatgagtatggacaaaaattatgaagaatctaatcttatagtatttggtgttggatttgatggaactacttctaacagacctggggctagatttgcaagtagctctatgagaaaagaattttacggtcttgagacatatagtccttttttagatttggacttagaggattataatatatgtgattatggagatttagaaattagtgttggaagtacagaacaagtcttaaaagaaatctatcaagagacatataagattgttagagattcaaaggtaccctttatgattggaggagagcatttagttacattaccagcctttaaagcagtacatgaaaagtacaatgatatatatgtaattcattttgatgcccatactgatttgagggaagaatataataatagtaaaaattctcatgcaacagtaattaaaagaatatgggatattgtaggtgataataaaatatttcaatttggtataaggtctgggacaaaagaagaatttaaatttgctacagaagaaaaacacacatacatggaaataggaggaatagatacgtttgaaaatatagttaatatgctaaatggaaagaatatttatctaactatagatttagatgtattggatgcatctgtgtttccgggaacaggtacaccagaacctggtggtgtaaattatagagagtttcaagagatttttaagattataaaaaactctaatataaatatagttggttgtgatattgtagagttaagccctgattacgatacaacaggtgtatcgacagttatagcttgtaaaatcttaagagagttatgcttaataatatctgataaaattaaatagagtattttatataaatagtatatattataatataagaagttattttaaaaaagttagtttaagtttgacgcttttctaaagtaacttcttatttttgtaattaaaaataaatataataaacaacaaaaaagagccctcgatagctccttttctaaaatatatatatttaaattaaataattatattctatttacgttttcagcttgaggtcctctattaccttgagttatatcaaagctaaccttttcgccttcttctaaagttttgtatccatcattttgtatagctgagaaatgtacgaaaacatcatcttctccctctacagatatgaacccaaatcctttttcattgttaaaccattttactattccgtttttcattataagaaaacctccgcattattaaaaaatacaaactaaaaaaataagtctgttctattaatataacataaattttaaataaaagcaaataaaatttttaaaaaaattaattacttttagaatttaataaaaattgttaaattatacagtgagaagtattgtaaaatttgacgaaaatgtaaatgtagataataaatttaatgtcaaaaaatgcaacaaaaaggtatgtaagtaaaaagtaaaattaaaatatataataaaaaatattatatattagattaaaaagtaaaaataaaaatagtgaaatttcagaaatatcaataatattatataataaaataaaaaaacactatatatattcgataaaataaaatttaaacatataatattttatgtatatattaataaaaggacatattgtgttataatggtatcgtataaaatcatttacgggggtggtattaaaatgtttcaatttgaaacacaaatacacaaattaagacatgatgttttaactgcaatagctagacttggaaaagaagataaccttaccagagaagcaatggataatattcagtatgaaataataaaaggtgagaaacctacatacagatgttgtgtttataaagaaagagctataatatctgagagagtaaatgtaagtatggggttacaaccaggtcaagataagatagatttagatacaatggatatagaagaagatgaacaaattatatatattttggaagctgcatgtgacagttgtccaataaatgaatttacagtaacagatatttgtagaggatgtctagcacatagatgtaaagaagcttgtaaatttggagctataacacatgtcggaggaatggcctatataaatcatgaattatgtaaggcttgtggaatgtgtaaaaaagcttgtcaatatgatgccatctcagaggttgttagaccatgtaagagtgtttgtccaactaatgccttaggatttgatagagaaaatatgaaagctatgatacatgaggataaatgtttaaactgtggagcatgtatgtcagcatgtccatttggagcaatatctgataagagtttgatagctcctgtagctagaaagttggttcaaaaagagaaaatgtatgcggtagtagctccagctataacaggtcaagttgaagcaaatgttacatatggtcaaataaaaaatgctataaaatcactaggatttgttgatgtattagaagcagcttgtggagcagatgcagttacagttcatgaaagcttagaatttgctgaaagaatggaaaagggagaggcttttatgacaaattcttgttgtccaggatttgttggttatatagaaaaaacatacccaaatcatgtaggaaaaatatcttctacagtgtctcctatgatagctagtggtagatttataaaaagtcatgaaccagatgctaaagttgtattcataggaccatgtacagccaaaaagagtgaggcagctaagaaagaattaaaaggagctgttgattatgtacttacttttgaagaaataatggcattatttgaggcatttgatatagacttggctaagtgttcaaatgaagatatagatgatgcatcaatttttggaagaggttttggagctgctggtggtcttacaaaagctatagaaaattatcttgctgaaaaaggtattggtgttaattttgaacctgtaaagatttctggttcaagagaaatcaagaaaactatgactatggctaatttaggaaagctagaaggtaattttatagaaggaatgatgtgtgaaggtggttgtataaatggttctggtaaattcttatcaggtgcaaaggttaaagccacttttgatagaaaaaattctcaatcaactaagaaaagtgtcttagcaaatacaaagataaaagattttagtaatataaatttagaaaaataaagataatacaaagcaacaaaaatacatattgttaatagagttgttctaagttgaggtttaacttttggacaactctatttttatttatatatttaattaatgaacaactaaaataaaaattacatatataatattttgtatataacttaacaaagtatatgcctatgttataataatttatagaaataaataaaaaatacaatatacataatagtagaaatatagtaaaaaggtgtgatttatagggaggattacttatgtttgaatttgaaacgcaactaaaaaggttgaaacatgaagttttaacagcagtagcaagactatctattgaagaaaatttaacaaaagaaaatatagaaaaaattccatatgaaataattaaaggagaaaaggcgagatatagatgttgtgtttataaagagagagaagtagttcttgaaagggcgcaacttgcattaagtttaactccaaatagtaaatatggagatataaatccagattcagttagtttggacacagatgagcaaattatatatatagttgaagcagcatgtgatagatgtccaataaatgaatttacagttacagagctttgtagagggtgtttggctcatagatgtaaggaagcatgtaaatttggggcaatttcttatataaatgggagagcatatataaatcatgatttatgtaaggcttgtggaatgtgcaaaagttcatgtcaatatgatgctatatcagaagttgtaagaccttgtaaaagcgtttgtccaacaggagctttggattttaatagaaacactatgaaagcaatgatacatgaagataattgtataaattgtggagcatgtatatcagcatgtccttttggagcaatatctgataagagtttgatagcacctgttgcaaaaaaacttgcaaagaaagaaaatatgtatgcaatagtagctccagctataacaggtcaaatagatagtaatattacatatggtcagttaaaaaatgctataaaatcacttggatttgtagatatgatagaagcttcttgtggagcagatgcagttacagttcatgaaagcaatgagcttattgaaagaataaaatcaggagataattacatgacaaattcatgttgtccgggattttttaagtatatagagaagatgttcccagatgaaaaagatagaatatcatctacagtgtctcctatggtagcaacaggaagattagtaaaaaaaatagattctgatgctaaagttgtatttatagggccatgtacagctaaaaagagtgaggcaacagagaaaagtttaaaagattcagtagattatgtacttacttttgaagaactaatggcattatttgaagcatttaatatagatttatcaaaatgttcaaatgaagatataaatgatggttcgatttttggaaggggatttggagcgtctggtggacttgccaaatcagtacagaactatattgctgaaaagggacttagttttgagtttgaacctataaaagtatctggtccaagacaaattaaaaagacaatgacaatggctaaattgggaagattagaaggtaattttatagaaggaatgatgtgtgaagaaggttgtattaatggagcaggtaagtttttatcaggtgtaaaagctaaaaatacttttgatagaaaaaatggacaatctactaaaaagagtgttttatctaatgataagattaaagaatttgaagatgtaaatttagaaagataattgttttggtacagtcatttttttatcatgccacaaatatgcctaaaattttccctttttatatgtgtattttacagagttaaggttgctatactataaatatgtaataaataaaatttataggagcttttggatgaagaaaatagtattaaaagatatcctgtttttagttactacattatctataatagtaatattattgtttgtaacaaatataactactaatagtaagataaaatcaacaagtgaatcttatttaaaaagtgacaaaaatagtgtgaggcaaaatggtatccagaggagcacaaaaaatactgcatttaagactactatattaagtactggaaagtctgactgtatattaatcgagataggtgataaattcataatgattgatacaggagaagataaaaatggagaacaaatagttgataaattaaaagaaaaagaaataaatgcacttgactatttgattaaaaaatagctacgcacactcgtgcctttagtcatgagttagtagctaaaatagtcagcatatagggaaacctatatgtagagataggatagaacctatccaatactacttgaattgctggaaacccctaaagctaaccaaactaaaacataaggatgaaataaacctaagtgtgaaagttacgaaagtagaaaaaattggttagatggtataaggttaaaccctaagtactttaaaatgggcaatcagcaggtaaactccgaataggagaaacttcaacgactattcctcttgagggaagtacactacaagttatcggtagtggaagtgggtagaccttaacggataatgccgaaggataagatatagtctgtgcttgcatgaaagtgtaagaagttcataagagaactgcataggtagtagcgaacttatgtgaacgacaacctcaaaaatgataaaagttaagacttacggttcttaaatatgttatttaaaattaaatataaaaccttctaaataattgttttaaataattacatttgttaacattattataggtgattaataaattgttcaccacagcattatataatatattaaatgtgataaaatcattaaaaagtgtatcaaaaaacaattaaagtgaggtgatagtagtggaaaaagcttataagtttagaatatatccaaataaaaaacaacaagagttaattaacaaaacttttggatgttgtagatttgtatataataaatatcttgctaaaagaatagatgtttataaaagcgataaagaaacttttacttataaacagtgtagttctgatttgaccaatttaaaaaaagaattaaagtggcttaaggaacctgacaaattttcactacaaaacgccttaaaagatttagataatgcatataaaaaattttttaaagaaaaagcaggatttcctaaatttaaatcaaagaaaattaatagattttcatataaaactaattttacaaatggaaacattatgtattgtggtcaacatataaaactacctaaacttggtatggttaaggtaagggataaacaaatacctcaagggagaatacttaatgctactatatctaaagagccaagtggtagatattatgtatcattatgctgtactgatgtagatattgaagtatttgaaaatactaacaatcagataggtttagatttaggaattaaagaattttgtatctcaagttgtggagaatttatagaaaatcctaagtatcttaagaggtcattaaacaaacttgctaaattacaaagagaattatcgagaaagacaatcggtagtttaaataggaataaagcaagattaaaagttgcaggacttcaagaacatatagccaatcaaagaaatgattttctacaaaaactatctactaaattaataaaagagaatgatattatttgcatagaagatttacaagtaaagaatatgattaaaaatcgtaaactatctcgcttaatttctgatgtgtcatggtcagaatttgttcgtcaattagaatacaaggctaattggcatggtagacaaattgtaaaagtaggcaaattctttgcaagttcacaaatatgcaataaatgtgggtataaaaatgaggaagttaagaacttaaatataagagaatggatttgtcctagttgtaatgaaactcacgatagagatataaatgcaagtataaatatattaaaagaaggattaagactaataacaattcaaaataaataacgtatgtaagaaccgtaggaactacggggatagcctgtggagaattagtaagacatatgttagtatgcaaaattctatgaagcaggaaccctgtgactttagtcataggaggttcagtttaacccatttagataaggaccatataggtggagtagatagtgtgttatctagtgttaaagtaaagaatattatacaagcaaattataagaaagatagtaagcaatatgatgaatatattgactcacttaaaaaagctgatatagaaccagtgctactaaaagataatatgaatattgtaatcaatagtgcagaaataaacatacatccggcttcaaaaagcaagtacgagagttcaaatgattattcaataatcactaatataagctatggagcacataagtttttatttgcaggagatgcagaggaagaaagattgtcagagtttataaatggaaatactttaaaatatgattttgttaaaatgcctcatcatggaagatatgacaaattaactgaaacatttttagagtctacttcaccccaatatgctgttattacatgttcagagaaaaaagaaccagaggaaggtgttttaaaaatattggaaagattgaatataaaaacatttttgacttctagtggagaggtagttatcaatagtgatggtaagacattgagtgtgaatcaataattttttttaaaatatctaaaaaaaatttaaaaaaatcattagcaaatattaccccttaaacatagtatattttaggagctgaaactccacatacaaaatgactaggaggtaacatattatgttggatagattttttggtgaaggcggatttggtggatgtgcttggtggataataatattattcttcttattcttagcattccaagattgttgggctgaaatggacttatgtgcatggatacctttcttaatattattattaatactttgtgaatgtggtgacgtttttgatggaggatgtggatgctaaaaaaatcaatttagatgatttaataaagcttatggtgggtataaataaaataccaaaccaatcacaatctagtgtttgaaggtagtcggaaatcccccgctaccttcttttttttattgttagaatttatttttgaattatttcatttacatataataatttttacaataaagtctgatataattaaaaagaaaataaaatttatttataggagatgtaaaaatggctatagtggataagattttcaatgagataaaacttatggttgcaagacttttattgggaaaaaaatacagtgaatatgaagaaaaagatttagtgtataatacagaagaagaagttatacttataactttaaaaagattagtttttcagggaaatgtaaacgaagcagaagaaattttatttgataaagctaagactgtaactagtgaaaatatgcagtatatagcaatagaattttatactatgcttatggaaaagactgatgaagaattagaagctatgaatttttctaaacaagaagtttatcaaggtatagaagatattagaaaagtattgaatttagaataaaagatatatgaaaatattgaaataaattaatgttaaggtgagaatattatacttatatataaaaatataatattcttattttattagttatattaggtatatcttatttaccataaaactatcttgaaaaaaattaatcttaattgtataatattactttgagtgaaaaagtattaacatttttttataagatgttttactaaaaaaatatatataaatatactgttatcaacaagaaatttaatttagtgaggtgttaagatgaaagtaggatttgaccacaaaaaatatttagaagagcagtctaaatacatcttagaaagagtaaataattttgacaaactttatttagagtttggaggaaaattgatgggagaccttcatgcaaaaagagtacttccaggatttgatgaaaatgcaaagataaaagtattacaacatatgaaagaaaaagttgaagttgtaatttgtgtctatgcaggagatatagaaagaaacaaaataagaggagactttggtatcacttatgatatggaagttttaagattaatagatgatttaagaggttatgaactagatgtaaatagtgtagtaattactagatttgaaggacaacctgctacaactgtatttataaataaattagaacgtagaggaattaaagtttataagcattatccaacaaagggatatccgtcagatgttgagactatagttagtgatgagggatatggagcaaatgaatatatagaaactacaaagccaatagtagtagtcacagcaccaggacctaatagtggaaaacttggtacttgtctaagtcagttgtatcatgaaaataaaagaggtaatgtagttggatattctaagtttgagacattcccagtttggaatgtacctgtaaaacatcctttgaatatagcttatgaagcagctacagttgatttaaaagatgtgaatatgatagattcattccaccttgaaacgtatggtgaaatgtcagtaaactacaatagagatttggaattatttccagtgcttaaaaaaataatagaaaagataactggaaaagaatcaattttccaatctccaactgatatgggtgttaatagagttggctttggaataatagatgatgaagtaataagaaaagcttctatagaagaaataataagaagatactttaaaactgcctgtgagtataaaaagggacaagttgataaaggcgcttatgatagaatgaaaatgattatggaagagcttaacttaaagccagaagatagaaatgttgtattacctgctagaaattacagtaataaattaaaagaaagtgccgacaagaatgatacttgtcctgtagttgcattagaattagaagatggtacaatattaactggtaagggttctgatttaatgaatggaacagcagcagtagtattaaatgccattaaacatttagccaatatatctgatgatatgcacttaatatcacctgtaatattagaacctatcataaacttaaaaacaaagactttagctagtagaaatgtttcacttagttgccaagaggtgttaactgcacttagtatttgtgctgtaactaatccaactgcacagtttgctatggaaaagttagcattattaaaagggtgtcaagctcattctactactatattaaatagagatgatgaacaaacatttagaaagcttggtatagatgtaacttgtgacccagaatatccttcacaaaatctttactatagttaaaattatataaaaaaatatgggctgttttaaagtaatagtttgagcagtccattacaattataataaaatcagtaggctgtcttgtataagacagtcttttgtttttaaaacatcccataaattaaatatatatactgttatccataaggaattttaaatttagttccttggaatacctattgtaaagcttttatatagtttttgcaagtgtttttaaggattttttataaattatattgaagttaatggattatagatggttttatttatggaaaatatgaatatataaagaaaataatgaaaaaataccaaaaagaaacataagtttggtataattaaaaagtaatataaataaaattaatctatttatactttaaaaggtgataataatgaaacattatagaaaaataattcatatagatatggacgctttttatgcatctatagaacaaagagataataaaaaattaaaaggaaaacctgttattgtcggtggaaatccacaaagccgaggtgtggttgcaacgtgttcttatgaagctagaaaatttggtatccattcagctatgccatcagctgtagcttacaataggtgtccatatgcagtttttgtaagacctagatttgatgtttataagagtgtgtcagagcaaataagagatatattttatagatacacggatttagttgaaccattatctttagatgaagcttacttagatgtaacaaaaaataaaaaaaatattgattcatcaattgagatagcaaagcaaataaaaaaagatatatttagagaagttggtcttacttcttcagctggtgtgtcatacaataagtttcttgctaagattgcatcagacttaagaaagccaaatgggttaactgtaataaccgaagaaaatgcccaggactttttagataaattacctgtgaataaattttttggtgttggaaaagttacttcaaatactcttaaaaatttaggtataaaaactggatatgatttaaggtgtttaaatttatttgaacttgaaaatatattcaaaaaaagaggttatgaattatataaatttgctagaggaatagacgatagaccagtggaaccaaatagggttagaaaatctgttggggctgagactacattaagtcataatttggatattgatgaagaagaaacacgcaacattcttgatgaactttgtgaagaagtatgtcatagattaaaaagctctgagaagtttggaaaaacattaacattaaaaattaaatatgaggactttacaaagataactagaagccttagtttagaacactatattgacgaatataatgatataagaagtggtgtagataatttgttgagaaatgttgaggttaatggaaaacaaattaggctattgggagttacaatatcaaacttaagtgataaaaaagaaacttataaagatattacattatttgaatacatggatagtattcaaatgtgagttttgtttaaatgaaataacactagctttaatactatataattgaggctagtgttattttatgaatatttttatactttttgttttttgacattatatactatatataaatactttatatttgtagcaatattcagacaaatagtgacctaaaaatcgtactttgtttacataaataaaatagtatgatataattataaaaacaacttataatattggagaaggttgcttgttcgaaaaaggggatgataaattatgatagagataagaaatgtaacaaaaaaaataggaaataatgttatattagatgatatttctctagttgtagaaacaggtacattggtagttttgattggttcaagtggttgtggaaagactactactttgaagcttataaacaaattaataaaacctacatctggtgagatatatattaatggcaaaccaatttctcaggaaaatgaaatagagcttagaagaaaaataggatatgttatacagaacacaggcctattccctcatcttacaataaaagaaaatatagagctaattccacgcctaaaaaaggaaaaatccgttgaagaaattgaaaaaagaacgttgcaactacttgagatggtaggacttgatagtgatgaatttttgaataagtatccttcagaacttagtggtggacagcaacaaagaattggtgttgcaagagccattgctactgatgctgaaataatattgatggatgagccttttagtgctttagacccaataacgagaacatctttacaagaacaattattttctcttcaagatgaattgaaaaaaactataatatttgtaacgcatgatatggatgaggctttaaagatagctgataaaatttgtattatgaaggatggaagaatagcacaatatgatactcccgaaaatatacttagaaagcctgcaaatgactttgtaaaagattttatcggagaagatagagtttgggataatccagaatatataaaagcaagagatattatgataaaaaatcctattgctgttaattccactagaactgtaactcaaggaatagaaattatgagaacgagtaaggttgatagcttactaattatagatagagcaaaaacattaaaaggtattgttactgtaaaagatatgaaagatattgatgataagtcaatattacttgctgatattatgtcgagtgagcctttgcatgtaaatgaaggtgataatttagtagaaatactaaatgtaatgaatcgtaattcggttggatatattccggttatttctgatgaaaataaactggtagggcttattactagaagtagtttactttctgttttaagtgaacaattcttagaaatggaggtgagtgttcttggctaatttttttaactttatactattacaaaaagataagattatagagcttttaatacaacatatgagtctaactgttacatctattttaatagctataatagttggtgttcctcttggaataattatttcaagaatctcatctcttagaaagtttgtacttggatttgtaaacttagtccaagcagttccgtctatggcacttttgggtcttcttgtacctatacttggcataggaagtaaaccagccatatttatggtagtggtttattcattactaccaattgtaaaaaatacgtatataggtataacaagtattgacccagtagtattagaatcagctaaaggtattggtcttacaagaaatcagacattatttaaaatacaattccctttagcacttcctataataatgggtggagttagaatatctgcagttacagctgttggtttgatgactcttgcagcatttataggtgctggtggtttaggatatttagtattttcaggggttcaaactgtaaataataatatgattttagcaggggcaatcccatcatgtataattgcactgttagttgattatttatttagtaaaattgaagttgcagttactccaaaaggattaaatccaaaagcacctaagaaaaattatatagcacttaaagtaatatctgtagtggttgttgtttcaatgttgttcgttgtttttagttctagtttttcaagtaaaaaagatacaataactattggttctaaagattatacagaacaacttatacttggtaatgtttatgctgaattagtagaaaaaaatacgaatcttaaagttaagaagaatttaaatctaggtggttcatctgttgcgtttaatgcaattaaatctggtgagttagacatgtatgttgactatacaggtacacttttggtaaatgtaatgaaacatgctccgattaaagatgctgatgaagcatataatgttgtaaaagatactatggaaaaagaaaatcagttaactttacttgaccctcttggatttaataatacttacacattagctatgatgcctgaaactgctgaaaagtatggaataaatactatttctgatttgactaaatatggtaaagaatttacattctcaccaactttggagtttgaaaatagagaagatggtcttgtagggctttctagagattatggtttaaaattcaaagatgtaaaagcaatgaatggaagtttaagatatacagctttagataataatgaatctcaggttatagatgcatttttaactgatggtcttattaaaaagtttaatcttaagatattagaggacgataaaaatttctttgtaccatattatgcagcaccattagtaagagaagatactttgaagaaatatcctgagttagaaaaagttatgaatatgctttcaggaaaaataaatgaagaaactatgagagaacttaactatcaagtggatgaacttggtaaatcaccagaagaagttgctcattcattcttagttaaagaaggcttagtataaaaaattaatagtttatatcaaaaatttaagggagtgtctcaaaatgaactttttagttcatgaggcactcttttttatatgaaatcaaatatattttatcatttcaacaataaaaaagaagcttatctttattttgagacagtctcttatttttatgtataccaaaaccatacctacgatttttatttataattaagtttcaaatagaatgaacaagtacaaccaattttgaatataaatatagtaaatgtgcttatatacgattttattatctgggtgattgatattgatagatagctttctttattgaatcgaagggagggggaatttgttatggataactataagaaagtgaagcaagtattgtggataattttatttgctaattttgcagtagcattattaaaaatcattattggtaatcaaataaaaagctatagtatgacagcagacggatttcattctttgtcagatggagcatctaatatagtggggcttataggtattttctttgcatctaaaccaaaagataaaaatcatccttatggacataaaaagtttgaaattataaccagtttatttataagtggtatgttgtttgttatagcaattaagataattcttagtgcagtgctaagaatagctaatccagttgtacctgctataactatagaaagtttaattgctttaattattacactttttataaatatttttgtatgcatgtatgaatatagaattgggactaaactaaatagttatgttttaatttcggattcattgcatacaagaagtgatatatttgtgtctctaggtgtattggttactttagttggtgttaagttaggatttccagtaataatagaatctatagttcctattattatttctgcattcataatttattcggcttatggaatatttaggccatctattggaattttggtcgatagagtggctgtagatgaggattatataaaagaaattgtgtttgaatttaatgaggtaagggatgttcacaatatcagaagtagaggtagcaaaagttctatttatattgacatgcatgtaatggtagacccatttataagcgtagagcaatctcatgatttaacacataaaattgagaaacaaatacaagaagaaattaatgaaaatgctcaagtaatagtccatattgaacctttttatagtttttaacttagctataaaatacaagttataaaaaaatataatttataaaaaaaatattataccataaataatttataaaaattatttatggtataatattttctataaagaaattaagtcttaatatatctaaggaggaatttacaatgagatacgttgaatatggaaagacagggaaaatggtttcagtagttggctatggaggattaaggtttgatttagaaaaaagtaatcaagaaaatgctgatttagtcaaatatgcgtatgaaaaaggtattaattactttgatacagcgccagggtattgtgatgacagaagtgaagatatatttggactagcctttagacaaatgataaaggaaggtaagaccgatttttatgtatcaactaaagaaaagccaaaagcatgtgatacatcagaaaaagctatagaggctgtaaaaaaatcaatagaacgattaggcgtatctaaaataaatttttatcatgtttggaatattagaaagatggaacattacgaactagcaatgagacctggaggtcaatatgaaggattattgaaatgtaaagaagaaggattgatagaccatatagtattttcatctcatcaaccaggagatgaggttatagatattctaagtgaaaataagtttgaaggtgtaactatgggaataaatatattaaactttccatataggctaaaaggtgccaaatatgctgttgataatggatatggtgttgtggcaatgaatccattaagtggtggaactattccaaagtataataaagaactttcttttctatcaaaagatggcgaaagtactatagaatcagctttaagattcaacataggaatttcacaaataagtatatctttgatagggtttaataaaaaacaagatatagatgatgcatgtaaaattgcagacgaaaatagaatttattcagatgaggatatacatgatattgagactagattaaataagaatatgaacgaaatatgtacaggttgtggttattgtaaagtatgtccaaaaggtattaataccccagcctatatgcttttttataatgaaaagcagatgtttaaaaagagtgatgaagaaatgacaaagttagtttatggtttaggacattggaattacacaatgaatagtaaggcaaaagctaaagaatgtatatcttgtggaaaatgtgaagttgaatgtactcagcatttacctataatagatagattaaaagaaattaaaaaatgggaagaagatggagctaatagtgttaaagtctaattaattttatactatatttgaaatttgtatagtatttagtaatgttttaaaatatagttttaatatttaaggagacagattataattttgtctccttaaattatgctttaatttgttatagtttaattccataagcaacattgtatatttttatataaagtttttcaaatattttacattaatattgcttacaaattctcattttatacaacactaatctatgttatataaacaatacttgactgattataacatcaataaagtaaatattgtggttgtaaataaagagttattcaattacaataaaacaagtaagaacattatgaagatggctattaaatataaggaataaattgtaggtgtcagcaaatcctatataatgaatggatggtgatatattgatgagtaaaatattaaaatataaaaacgagatgtttttgtttatattagttgtaataacttacttaataataactaagatatttttttctaagactactatattttataatttaaacaatacttatgatgtattgttagatacagatacaggggttttattcaatttaaatgtatttgctataagtcaagacaatagtaagcacatattgttttcagcaattatatcaatttttgcatatccaatatacctattttgtacttcaatagcaaatcctgggacaacagattttaatagtgcctatgggtttggactaatttgtctacaaataataactagtgctatgtcaataactttagtctttaatcatattaaaaagataaaaatgcagagattaactttaattttacttactatgataatgatattttcttttccacagttatttatgactttaaatgtagagagatttatatatagccaattttcattaatatttttcatagttattgcaaataagatgaaaggaaaaaattcttatttagtagaattagcagctattcctctatttggaataactattagtaatatatatttgtatttttttaatatgatatttgagtttaaattaaaaataggaaaaatgttaaaacatttaattacatttatcctaatggcatatatttgtgtagtttcaacgaagtcttatgagagttttatgaaccttggaaatgtaatacagtatgatacgaaatttataagtggagaaccaattttggaaaagattgcaatgattatagagagattattgtattcggttttttattttcctggagcaagtattaaaaaagggttatttttgcaaaatggagaagttgctacaataccagtaattcttacattattagctttatgtttttgtgttttatcagttattgaaaattcagaaaaaagagttcctaagctatgtatgggaataattatattcaatctaactttacatggtatagtaggatataatctagtcaattcaagtattatggctataaattttagttttgcagttataattttattggcttactttacgaaagcgcttagaaaaaatgaaaagaatatgtataatatatttctatcgctgttattggttactatagtaatcagtaatgtcaatggatttatagaaattttaaacatagggataaaatcatatcctgtttaaaaaataatattgaaagggtagtaagtttatgaaacagaccaatacaagtataaggcttcttactaaaatttcagattatataaagttaatgagaataaagcaatatataaagaatttctttgtattttcagctataattttttcaaacaacatactaaatataaatttatttttaaatacgtttattgcgtttgtgtgtttttgcctaatgtcatcatcagtatatgcactgaatgatgctatagacatggataaagataaaaaacatcctaaaaaatgtaatagaccagtggcaagtggaagaataagcaaaaaaagtgctaatatactatttgtagtattagctttaatttcagtctgtttatcaacagttgttagttttaatctttctataattcttagtctctatttgataaacaatatattatattctcttaaactaaagaatataatactattagatgtgttttcaatatctcttggttttatacttagggtttatgcaggatgtgtagccataagtgttagtttatcaaattggataattttatgtacatttttcttatctctgtacttagctcttggaaaacgtaaaaaagaaatagaaactctaagagatgatgcagttgaacatagaaaaatattggaagattatgacatagaaaatctaaatcaaatgatgatagttatattaagttctacaattgtatgttattcattgtattctacaagtaatccagaaaagccacatatgatatttacaacaatatttgtagtttatggtgtacttagatataattatataattaacactacaaatgaaaataatcctactgatattgtcctaaaagataatgctttaaaaataaacgtaatcttatggataattacatgtttaataatattgattttttagtgatatttttagtgataggatggggaaatacttatgaaaaaaagtgtattattacttgatgtagattatactgttataaatactgatagcatgatagatttttttatttactctttaaaaaataaaacctttaaaactattataaagttgccatacattatttttattctatttatgtatttaattagaatgatacccttgaagaaggcaaaagaggcaatcttttatccaatagtagattttagtgaagaagatttaaaaaagttttttgatgattgcataatgaaaaaaattaacgaatctatgaaaaaggtcatttacaaaaataaagaagaagataatgttataattatgataactgcatctccatatgcatatatgaaatattttaagtattatggtcttgcagacaaggttataggcacggagtttttttatgaaaattcaagatataaaaatcaattcattggagaaaactgtaagggaattgaaaaagtaaaaagaataaaggctgtattaggtaaacttgggatagagattgattatgaaaattcatatgcatattcagactctaagagtgatttaccaatgctttcattgactaaaaatgcatttttagttagtaaaaaggatggtgaggttatagagcaaataaattcataacttaatgtcacttagaataggagggaatagtttgggatatttacacatattaattttatctatggttcctgtaacagaattgaggggagccattcctataggtattgcaatgggcttaaatcctatatgggtttatgtatttagtgtaataggttctacattggtatcgattcccttgatattgacattcagacatgtattacaatttttaagagggaagaaactatttaaagggattgctgatgtaattgatagaaaaataaactcaagaatgaagaaattaaaaagtgtttcgataattggtataatactatttgtaggtataccactgccaactacaggaacatggactgcatctgctatagcttccatattaaaaatgagaataaaagatgcttttatgggagtatttcttggcaatttgttatcaggggttatagtttcagctctttctttacatataatataaaactatctaagtaatatacttggatagtttttttatgagtacatgtgaaaaatttttaataataaataaaaaatgagataaagtatttaaattcagttagttctaaaatgtttactatggcaaaagaaatatagtatagtattacttgtagggaaagtactctaaatttgtctgctgataaaatgaaatttttatatagaataaaattttagtgatacattttaattattggattgaggaggttttaaaatggaaaattcaaacactaacttaggcagtgaaagtgtgggtaaattattatttaaacttgctacacctgctattattgcacaaattgtaaatgttttatacaacatagtcgataggatttttattggtagaatggaaaatggagaagttgctatggctggtgttggagtggcctttccaataataattataataactgcatgtagttatttaatcggtatgggaggaggtccattagctgctataaaaatgggtgagcaaaacaatgatgaggcagagaaaataatgagtaacagtttttctgtactggtgattttagcaatacttttgactataggttttaagattggaaaagagcctttactttggatgtttggagcaagtgaatctacaattagatattcaatggactatttaaatatttatttaataggtacagtgtttgttcagatttcaatgggtatgaatacttttataaatacccaagggtttgctacaactggaatgatgacagttgctataggtgctttaataaacataatacttgacccgatttttatatttggctttaatatgggtgtaaaaggagctgcattagctactataattgcacaaggcgtttctgctatttgggtacttatgtttctctttggaaagaaaagtatacttaaaataaaaaagaagtatatgataccaaaagcaagtatcatcttaccagtgcttggcttgggaatctctccatttataatgcaatctacagaaagtttagtacttatagccttaaatagtaaattacaaatgtatggaggagatttagcagtaggttcaatggccataatgagcagtataatgcaaattcttatgcttcctaatatgggggttacacaaggagcacaaccaataataagttataattatggttcaggtcaacttgatagagtaaaaaagacatttaagttgtgtttattgtcatgttttacatattctactattttatggcttttattaatgatatttcctgcattttttgttagtatatttaataagaatccgcagttacttagtatgactagttggagtataaaaatatattttgctggtgcttttatgtttgggattcaaatagcttgtcaacagacatttttagcacttggaaaagcaacaatatctttggttttagctctacttagaaagattgtacttttaatacctttaatatttatactcccaacattctttaatgaaaaactttttgcagtaattttagcagagccagttgcagatataacagctgctactataacagcaatttctttctttatattttataaatgttttctatcaaaacctaaagcaataaaagaataagatatacaatataaattttttatgaaaatattttattagataaaaattagaatttgtattttaatttaataagatattttctataatgtataaatatatgaagttgaatttattttaaaaattatagtaagaaaaatgtaagtatttgcaatattaatggtataatatttacagatatgataatcaataagaggaaaggatgtttataatggaaaatgatttaacaatgcaagaattacttgaccagcaagaacaagtattcagcaaagtgaaagttggagaattgacaactggaaaaataactgcagtgagaaatgatgaagtacaattaggattagactatgggtttgatggaataatacctataagtgaattgaacatagaaaaaaatcaatatatagaagatatataccacataggtgatgaaataactgctgtaataacaaaagtatctcaaaaagatggtacaataactttatctaaattacaacttgacaaaagaaatgattttgccgagttacaaaaggcttatgatgaacatagaataataactgtaaatgttgaaaagaatatagataaaggtgtatttgctaattacaatacatatacattttttataccaatttctcaacttgatacaaaatttattacagatacatctaaatttgttggtcttaacttagaagtttatataaaagaattggatgttagaaaaaatagacttgtagcatctcatagagatgtattacaagagcgtataaataaagagagagaagaaagaagagctcaaattaaggcagaaaaagaagctgaaagagcaagaattaagcaagaaagagaagaagaaaaagctcgtatcaaagcagctaaagaagacttatttaattctcttgaagttggacaaaaaagagatggtaaggtgacaaagataatgccttatggtgcatttgtggatattggtgggattgaaggattagcacatataaataatttagcttggacaagagttgaaagtgttgaagatgttgtttcagagggacaagaagtagaagtttatgtgttggatgtaaataaagagactaaaaaaattgccttggcattaaaagacataaataatgacccttgggatttaatagcaaaagaagtacaaattgatgatgttgtcaatgctaaagttcttagaataatagaaaaaggggcttttgttcaaattaaagaaggtgtagatgcgtatttaccaatatctgaattgagtgatactagagtggctaaagttactaatgttgttaatattggagatgaggttaaagttaagattcttgattttaaaccaaagactaaaagaatgttggtttcaataaaagaagcaactagagagccagaagaggatataacagaatacctagaagtagaggaatctttaggaagtattggagaattatttaaagataaatttaaagatttagaagtgtaaaataattgaaaatggggctgttttaaaacgttacactgtctattatgacagctttagttttgaaatagccctttagctattttcacgaatttatgtaaaatattaggaggaaatttaatgaaaaagtctattatggatgtacattgtcacactctaataagtggacatgcacatagtactttcaaggaaaatgtcgaagaggcgagtaagaagaatataaaatacttaggaatatcagaccacggacctaatatgccaggaggaccacatccattctatttttataatttgcatttgcttccacgtgaagtgcaaggtgtaaagattcttaggggaatagaaggaaatataatggattatagtggtaatttagatgttcaagaagatatgttgcaacatttggattatataatcgcaagtttgcatagaccttgtatagcttctggtacaaaagaagaaaatacaaatgctattttaaaagttatggataaacctaaggtaaaaataattggacatccagatgacagtaggtatcctttagattatgaacctatagtaaaaaaagctaaagataaaaatatccttttagaaataaataattcatcattaagttcaaactctcatagaacgggtacttgggaaaatgtaagtcatatgttgacattgtgtaaaacatatggtacaagagtaattcttggtactgactctcatatatgttattctataggagaatttgaaaatgcagaaaaagttttagaagcagtagattttccagatgaattagtcataaattatcatgaagatgaaattatagaattttttgatataaatttttagaatcttgggagtgaaaaaatttgagtaaaaataagtttatctatatgaattattatgacaatggttattttaaaaaaggaatgactatatatatggttttagcacttataattttagctacaatttttatatattcaacgacaatattatatattttatgtataataacagcagtttttctatttaaacaaggtcgtgatttttcaaataaatatgagggaaaagtatatattactctcgataatcattcaatattaataaataatcaatgtatattcagtataaaatctaaacaaagtcaaaagtttaattataagataatagaaaaaatagaagtagtaaaaaatatattaaatatatacactgacgaatctaattataaaattagattaagggcattgagtttggaagatgaaaaaaaattattgaatatcatagatgaaaagatgaaaaagtttaaggcataatatcatactgttttcaatagttagcatgttttatagaattgcttatcaaaaataaaaaattgagataattattttttttgttgacaatacattttaatgtgtatataataactattaaatcaaaatatttagaaaatttaaatgattaaaaaagtgatgaatagaagtagtaagaacaatgaaactttcagagagctaaaggatggtgtgatttagtagttgatagttctgaacttgtctaggagctgttttctaagatttaaatcttagaataatcggagtaattccacgttataggaaatatagtcattataattattgtattggctattactaagggagctttttagaaagctaaatagagtggtaccgcgagcaaaacctcgtctctaattttattagagatgaggttttttttattctaatgataaaattgacatttatccttatgaagtgtgcaggattgcgtcgatataaggtatactgaatacaaaaaacagaaaaagggggaaataacatgaagtgtggaaagtataaaaaatatgataaaatgcaaatagtaaatcgtaaatggccagataatgaaatatttaaggctccaatttggtgtagtgtcgatttaagagacggaaatcagtcactgccaacgcctatgagtgtaaatgaaaaagtcagaatgttcaaaatgcttattgatacaggatttaaagaaatagaggtaggatttccatcagcatcaaatacagagtatacatttttaagaaaattaatagatgagaatatgattccagatgatgtaactatacaagtacttacacaatctagggctcatcttatagaaaaaacatttgaatcaataaagggatgtaaaaaagcaattatacatttatataactctacatctgttcttcaaagagatgtggtttttaatatgagtaaacaagaaataatagatatagcagttgaaggagcaaaattatttaatgaagaagtaaaaaaatatccagaaacagaatttacttttgaatattcaccagagagttttacaggaacagagatggattatgcacttgaaatatgtgaggcagtgatagatgtttggaaaccaactcctcaaaaaaaagtaataataaatcttccatcaacagtggaaatggcaacaccaaacgtatatgcagaccaaatagaatggttttgtaaaaatataagttgtagggattctattatactaagtttgcatactcacaatgatagaggaacttgtacggctgcaagtgaacttggattattggctggtgccgatagacttgaaggaacactatttggaaatggtgaaagaactggaaatatggatatagtaaatgtgggacttaatctttatacacaaggaatagacccagagctagattttagcaatatagataagataattggtatatatgaagactgtacaaaacttatggtacatgatagacatccatatgcaggtaatcttgtacattgtgctttttcaggttcacatcaagatgctattagaaaaggcatgatagcaatgaaaaacagagataatgattactgggaagttccatatttaccaatagaccctcatgatattggaagagaatacaaagaaattataaggataaatagccaatctggaaaaggaggagctgtttatataatggaaacagattatggatttatgatacctaagaatatgcattctgattttggaaatgtagtcaaaatggaatctgatagaattggggaagaacttagtagtgaagcaatatttaatttatttaagaaagaatatattgaagttgagagcccttataaagttaagaagtataaaataaaatcaatggatgaattaaactatgaaaatgatgattctaatgatactaacatgattgagatgactgcaagaataagttatatgggaaatgaacaaaggattgttggtataggaaatggacctgtagattcatttaataatgcactaaagcaatgtggcatgaaagattataaatttagatattactgggaacatgcattagaggaagggtcacattcaagaggggtagcttatgtaggaatagagcacaataatgaagtctattttggtgtaagtatatcggaaaacataaatacagcagctattaatgcacttatgaatgcaataaataaaagttatattgaggaggaaataaaaaatggggatgactatgacgcagaaaatattagccaaacatgctaaattaaatgaagttaagaaagggcaattaatcgaagcagatttagatgtagttttaggtaatgatataacatcaccagtagccattagagaatttgaaaaattaggaattgaagatgtttatgataagactaaagtagtgatggttttagaccactttacacctaataaagatataaagagtgcagaacaatgtaaatttacaagaagtttcgcaaaatcaaaaggagttgtaaatttttttgatgtaggagatatgggaatagagcatgttcttcttcctgaaaaaggtatagtaactgctggagatgtaattataggtgctgactctcatacttgcacatatggagcattaggagcattttctactggtgtaggttcaactgatatgggagcaggtatggctacaggaaaatgttggtttaaggttcctggagcaataaaatttgttttgaagaataaaccaaataaatggataagtggtaaagatataatacttcatataataggggagataggtgttgatggagcactttacaagtcgatggaattttgtggagatggagtagaatacttatctatggatgatagatttactatttgtaatatggcaatagaagcaggagcaaaaaatggaatctttccagtagacgataagactatggaatatataaattcacataagtgttcaactataacaaaagatgtaaatatatatgaagcagatgaagatgcagtctatgatgaagtatacgaaatagatttagccgaactaaaagaaacagtagcctttcctcatcttcctgaaaatactagaacagtagatgagatagataaggatataaagatagaccaagttgtaataggttcttgtacaaatggaagaatatcagaccttgaagtagtagctgagataatgaaaggcaaaaaagtagcagatggagttagagttatgatatttcctggaactcaaaaagtatatcttgaagctatagaaaaagggtatattaccacttttatagaggcaggagcagcagtttctacaccaacttgtggtccatgtctagggggacatatgggtatacttgcagcaggagaaaaatccatttcaacaacaaataggaatttcgtaggaagaatggggcatgttgattcagaggtgtatcttgcaagcccagctgtagcagcagcatcagctataactggaaaaatatcaaaaccatcagaaataatttaagggaggtaaaatttatgattgccaatggaagtgtttttaaattcggtgacaatatagatacagatgtaataataccagctagatatttaaatatagctgattataaagaactagcaacgcattgtatggaggatattgatgataaatttatttctaaggtaaaaaaaggagatattatagttgcaactaaaaactttggttgtggttcatcaagagaacatgcaccaattgtaataaaagaaagtggagtatcctgtgtgattgcttctacttttgctagaatattttttagaaactctataaatatagggcttcctatacttgaatgtgaagaagctgccaataacatagatgaaggggataatatagaagtagatttttctacaggtgtgataaaaaatataacaaaagaaaaagaatataaagcagaaccatttcctgagtttatgcaaaatattatattaaatgaaggcttaattaactcaataaaagcaaatagggggtagtggagtatgaattgtaatatagcagtcataaaaggtgatggtgttggaccggaaattatagatgaaggtataaaggttctaaataaaatttgttgtaaatttaatcatagattcgattgtgaatatgtattagctggaggatgcgcgattgatgaaattggagaacctctacctaataaaactgttgaaacttgtcgaaaaaacgaagctgtattgcttggtgctgttggaggaccaaagtgggataaatgtaagggagataaaagaccagagtctggtcttttaaaattaagagagtcattgggtttatttgcaaatttaagaccagctacaatgtatgaaagtataaaagaagcttcaccacttagaacggatatagttgagaaaggcattgattttgttgttgtaagagaattaacagggggcatttattttggagaacgtggaagaaaaatcattgatggtatcgaaaatgcttatgatgtagaaatatataacgaaaatgaaataagaagaattggtaagagagcttttgaaatagccagaaatagaaataaaaaacttataagtgtagataaggcaaatgtgcttgagagttcaagactttggagaagtataatggaagacttagctaaagagtttgaggatgtagaactgtcacatatgtatgttgataatgctgctatgcaagttgtaaaagaccctagccaatttgatgtaatagtgactaataatatatttggagatataatatctgatgaagcatctatgattacgggttctataggtatgttaccatcagcatcacttagagaagatagttttggtatgtatgaaccaatacatggaagtgcgcctgatatagctggaaaagatattgtaaatccaattgcaactattctatctgtaagcatgatgttaagacatagttttaacttagaagaagaagctaagtgtattgaagatgctgtacaaagtgtactcaataaaggttatagaactattgatatctataatggtgtgggaaatgttgtaggaacaagagcaatgggcgaattaatagtaaatgaaatttagaattatagtttaatttgaataatataatttaaatatataacttgtagaattagtaaaaatctattgtagtataatttgttttatgaggggtgtctcaaaataaactttattagttaatgagacactcttttttatattaagtcaaatatatttttactattttaatagcgaaaaagaggcttatatctactttgagtttctattttgataaagttattttttggaaaataatactttaaattaaacttatcatattgaagtagcctatttttattattagaagtttgcagggattttattaatattatataatatattttagaattatttaatattaagcgactactaatgtcggttaggagatggattttttggcaaagtataaagttttgaagaagcaaaatagtagtaaatcttgtttagtttgtggaacacaaaatgagctaggacttaaagcagatttttatgaacttgaaaatggagagcttgtatcaatttgtaatacaaaggattggcatcaaagttatcctgggagagttcatggaggtatgtctgctgcaatattagatgagactattggaagagctgtaagtataaatgatgaccaaatatggggagtaacagtatctttagagttgaaatataagaaaccagtaccaacagatgctactataaaagttgttggaagaataactaaagaaaacagaaaattatttgaaggtacaggagaaataattctaccaaatggagatatagcagtgacagcaactggaaagtatatgaaaatgcctattggacaaattgcagaaggtgatttttctaatgaagaatggttttttgaagaatcgaaagaaaaagtggaatatattgaactttgattaaataaaaattttatattttaaaacataaattttatatttagaaaaaataaaattcaaaaatacaataaaaatacaagataaaaataaattagttatactaaaaagatttatcgtaatagcgtcaaatttacatactaaaaaaattaatttatatagataaaaagtatattttttttgagagaataattcagaaaattcagacttatgaaaaggcagaaaatgaatgttttcataaaatatataaaataaattatatataaaaaataaattttatgttgacatagttaattcagcttgatattatagttattaaaaataaggacagtaaaaacgctatccatattacaaactaaaaaggggggaattataatgagtaagaaattatttattcctggtcctattgatgttaaagaagaagtcttgcaaaagatggctacaccaatgataggacatagaggaaaagatgcatctatgctccaaaagagtataagtgaaaagatgcaaaaactattctatacaaacaacacgatacttttatccacgtcatccggaactggtttaatggaaggctccattcgttcctgtacatccaaaaaggcagcagtattttcctgtggatcctttggtgatagatggtacaaaatggcagtggctaataatgtcccagcggatatatttaaagttgaattaggagaggcaacaacgccagaaatggttgataaggtgctttctaccggagaatacgatttaataactgtaactcacaatgaaacttcaactggaataagaaatccaatagaagaaattggagaagttgttaaaaagtatgaagatgtaatctactgtgtagatactgtaagttcagccggtggaataaaagtcgaggttgataagattggaatagatatttgtataacatcagtacaaaaagcactgggattaccaccaggaatgtctatttgcacattttctcaaaaagcaatcgatagagctaagcaagtaccttttagaggagtatatcttgatttgttagcaatgtatgaatacttaatcaagaaaaactaccaatacccttcaacaccatctctttctcacatgttcgctttagatttccaattagataatatattagatgaaggcctagataacagattcaacagacatgaagacatggcaaacttagttagaaactgggctaaaaaacacttccaaatttttaccaatgaaaatcacttatccaatacacttactgttatagaaaatactcaaggtattagtgtatcaaatttaaattcaaaattacaagaacgaggattccaaatagcaaatggctatggagatttaaaagaaaaaacttttagaatttcacatatgggtgactatactgtcgaagatgtacaagaattattagataatattgatgatatattaggttttaataaataatattgtaaaaatatgtatgttttaagataaatttagaatatataataaataatattttataaaaattacatattaaatttttaacaaacaataggaaaatttgatatgactttaataaaaaaatattttgaaaattatataaacagaaagttaaattaagtaaagttttttattgatgaaaatactttaaaaaataaaaattggaaaaattaagtgaataaaaattggaggagtttgttatgtataatatattagttactgatggaatagagaaagaagcagcgagaaaattgagagagttagattttaatgtgatagagcagttttatgaaaaagatgttttaggagataaacttaaagatgttgatgtacttgtagtacgttcagctactaaagttactaaagatgtaatagataaagcattagagggtaaaaagttgaagttgatagtaagaggtggagtaggtctggataatatagatgttaaatatgctcaagctaatggcataaaagttatgaatactccaaatgcaagcagtatatctgttgcagagcttacaataggtcaattatttgttcttgcaagattcataaatactgcaaatgtaactatgagagatggaaaatgggagaagaagaagtataaaggtacagaaattaatggaaagacacttggacttataggttttggaagaattgcaaaagaagttgcaaagagagcagaattattaggtatgaatgttatatatactgacataatgggtgaggcgcaaggttttaacaattataaattctgtgatatggaagaagttttagaaaatgcagatttcttatctttacacataccatttgataagaataagggggcagtaataactgaaaaagaaataaataagatgaagaaaggggcttatttaataaactgtgcaagaggcggtttagttgatgaaaaagatttactaaaagcattagatgaaggtaaattatcagcagctgctatagatgtttatgaacaagaacctacattaaatttagacttagtaaatcatccaagagtttctcctacacctcatattggggcatctacagtagaagctcaagaaagaataggagacgaaatagtaaatgtgattcaagatttctttcttgacttcaacaatctaataggggtagcattataaaatattttgtataattaggaggaaattagtaatggcaacgattaaaccatttaaggcgattagaccaaataaatatatagtagataaagtagcagcacttccttacgatgttatgaatagtaaagaagctagaagaattgcagaagggaatccatattcatttttgcatatagataaatcagaaattgatttagatgaaaatatagatttatatgatgaaaaagtttatttaaaagcgcgagaaaatttatatgagtttcgaaaacaagaaattctagtaaaagatgacaaagagtgtatatatatatataaacaaatcatggatggtagagctcaagttggtatagtagcatgtatatcagttgatgaaagcttgaatggaacaataaaaaaacatgagtacactcgaccagaaaaggaaattgatagaactaaacacataaaatactgtgatgctaatacgggaactatacttgtaacttacaaacatcaaagggtgatagatgatataatcaatgattttatggataataatgaacctttatatgatttcataacagatgacaagatagagcatacagtatggaagattgatagtgatgatataatagataacctagtagataaatttgaaaaattagattatctatacattgcagatggtcatcataggacagcttcagcagaaaatgtagccaaagaaatgagagctaaaaatccaaattatactggcaaagaagaatttaattacttcatagcaatgattgcaccagatgagaatttaatggttttggattataatagggttatcaaagacttaaatggtttaagcgaggaagaatttataaataaaataaaagaaaattttgaactagaagaaatagaaggaaaagaaaaatataaacctgacaaaaaaggaactttcggaatgtacctaggtgataagtggtataaaatgaaagcaaataaaaatttattagaaatagaagaccctgttgactcattagacatttctatattacaagactatgttattgatgctattttaggaattgacaatcctagagtagataaaagaattgattttatcggtggaattagaggtcttgaagaattagaaaaaagagttaatgaagatatgaaagtagcatttgcaatgtatcctactagtattgaagatttaataagagtagcagatgcaaataagataatgccagctaagtcaacatggtttgaacctaaagtaagatgtgggctattcttacatgaaataaatgaataattaataaagggctaaaaagtgtacaattcactttttagcccttgtttttttgattgaaaatcgtatgtggaatataaattctataagttgatattcttaataatagttacctttttttagaaatggataattttaggatatagatagtcatattctatgctataattgaggatgaaaattcatataattgtatttgtatatttataaggttttaaatatgtatttataatagtattgttatatattttattataattataaaaaagttaataaaaaaagtgattttgaaatttatattttatttttataaatataattattatatttataaaaataaaatagtaaaaggatattataatattttactagaattattatctggtaacttaagttttgagtattaatctaaaatatatgtttttatagggtttaaattttatgtatacaaaattaatttgctaactgaatcatataaaaaaaacaaaatattttttagagggaatgattagatactattttctttgttatgaaattaattgaagagtaattaattagaaaaggaataaataataatgaatatattacattattactttttgataaatcaaaaataaagttatagtttttaatattaattaagaatgatgaaatatgaataaagattttacaaataaatcttaagctatcttatttaattctaatgcaggaagaaggtaaatgtatattgaaaaaatcatagaaatagaagtaaacaacttaaacaaatacaaaggtttgcaaaagaagtaatataattatatacaatgaggatgtgagtatgatgaacagactaaagccaagaattttaggtattagtatcttgtttattattataattattttaacatgtggagctgttttcaagtttaaatttaaattagataataaattaaaagaaaccacacatacatatttgtctgagtttacagaacacaatataattaatctcaagacaagacttagtggtcaatttgacatgcttgaatctattgctaacttcataggaaacttgaataatataaataatgaaatggtgattgctttaatggattctgatgtaaagcgaagttctttaattagaatgactatctctacattagatggggaatgttattctaatgatggaatcacccataatgttcaagatagagattattttaaaaaagctaaaaatggagaaaagaatatttcagagcctttaaaatctattgttaataataaagaaataatagttttatctaccccagtttataaaagtgggaaaatagttggtgttttaagtggaatttatgattcaaaaaagttaaatgagttattaggattatctgcatttgatgaaaaagcagatgtttttgttgcaaagaaaaatggagatatagttgctcaaaaaacaaataaaaatagaaagacgatatcatgtatatttcagctttttgacaaagataattgtgatgaagatgattgtctaaaaactataaaagaaaatatgaaaaatgataagtctggatattttaattataacttagataatgaaaaatttatgttaaactatcagccacttggagttaatgattggtatgttttttctgttgtgccaaataaaatagtgtctattcagtcagagaatatatcttatgatgtatatatttttgcattagaaatactactagttatattgatttttataatatatatagcatgtattataaataataacaccaaaattattataaatgaaaaagaaaaatttaaagtactcactgataatatattaggaggggttaaaacctgtttaaaagatgaatatatgactatgacatatgtaagtcaggggtttttagagcttacaggttactcttgtgaagatttaaataaaatatttaaaaatagatttaaagacatgatttataaagatgatttagacaagtttaattgtattattctaaatcaattagaaaaacaagataaaattgaagttgaatatagaattgtaagaaaagatggaagtataatttggattttggagagaagtaagtctataaatgataataaaggaagtgagtgtattcagggagttttaactgatataacagaacttaagaaaatacaagaagagttagattcaaaaagatttgaaatacaggctatcaatgatagtattgttggtggaatagtgataactgagataaatgatgattttgatagtatatatttaaatgaaggttatttaaatatgattggatatacacgcaaacaactggaagatgagctaaataataaattaatcaaacttatttttaaagatgatagaacagaattaattaatagtataaacaaacaactcaaattaagtgatacatttgcatctgaacaaagagttgaaaaaagggatggtactattatatggattttattaaaaggaagaaagataatttatgataatggaaaatctgtactttgttgtgttattgtagatatcacttctgctaaattattagagcaagaacttaaaaagagtgaagaacgtcatgaaatcattctaaagcagacgcaaaatatcataatagaatgggatatagaaaaagataaaatgaatatatcacctaattggtataataagtttaaatatgaccctataactgaaaacgcaacaaaaaatataattaaatcagtagatatatatcatgatgatatggataagtttatttcattaattaaacttacttcacaaggtagtgagtatgaagagtgtgaaattagacttagaactagagatactatttacgcttggtttagtataaaggcaacaactttatttgataataatggtaaaccttataaagtagtaggaagtttgactgatattgatgaatcaaaacgagaagctgaaaagttgaaagaaagggcagaaaaagaccctcttacagatttgtataataaaaaagcatcacaatcacttatagaagagtacataacattggataaaaaaagaaaaggtgctttaatgattattgatattgataactttaaaggaataaatgataatttaggacatttatatggggatgctgtattaagtgaaattgcaaatgacctaataaatctatttagagcaaccgatatagtaggcagaattggtggagatgagtttattgtatttataaaagatatttctgaaacaagagatattataaataaagcagaagaattggtaaaaacatttgaaaggtcttttttaggtaaaggacgaaattataaaatatcattaagtgtaggaattgctaagtttccacaagatggtatggactatatgacactatttagaaatgcggatatggctctttactcagccaaagggaagggtaagaattgttatacattgtatgataaaaaaattgataaagtccaatatataactaatacaagaaatgcaggagatagtgataatgtagagatgtcttttaaagaacatatcacaaattatatatttgatatactatatgaatcaagtgatatagaagtggcagtaaatttaattctaagtattgtaggtaaacactttaatgtgagtcgcatgtatatatttgaaaattcagatgataatcgagtatgtaaaaatacatttgaatggtgtaacgaaggtgtaacctcggaaattaataatcttaaaaatatttgttacaaggatttaggcaactatcttttaaattttaatgcagatgggttattttattgtaatgatattgaaaatttaggtagtgatgtgaaaaaagtacttaagccacaaggcatacgttcaatattacaatgtaaaattttagagggcaatgaatttagagggttcataggatttgatgaatgttcatataatcgtatgtggactaatgatgaagtgaacactttgacatttatatctaaaacgctcagtatgtttttattaaaaatgcgtattcagagtaagctagaagagtctttaacaattcaaaaatctgtgatggataatatggatatatgggcatatgttgttgacaggaatacctatgaattattatttatcaataaaaaaatgcttgagtcagcatcaaacactcatgtaggtgatttatgttataaagcgatatggaataatcaagataaaccttgtaaaaaatgccctatgatatatttaaaagatggtgatgatacttataaatcatttatgcgcaataaaaagtttgaggtacaggcaaatataactacaactactttgaaatggtttgatgggaaagatgcatgtttaatatttggaagtgaagtaactagtattgaagctgaagaaaatacttaaaatactgtgttatatatatacttaaaatcgcaatttgaatttattagacttaaaatgtctatataaatcatttaagttgtggttttaagtattttttatgatataattaagcgttaagaacaaaattaaaagatacttttgtataaaaaaatatttgttaaatatatattgagcaggtgataatatggaaaataagtttttaccaataagcaaacaagatatgatagatagaggatgggaagaattagattttgttctagttacaggagatgcttatgtggaccatcatagttttggaacagcaataatatctagagttttagaaaatgctgggtataaagttggaataatagctcaaccagactggagaactacagatgattttatgaagctaggaaaaccgagacttgcatttctagttaatgcaggaaatatggattcaatggtcaatcattattctgtaagtaaaaagcatagagaaaaggatatgtattctccaggtgggaaaatgggttatagaccagatagagctactatagtatattgcaataaaataagagaagcatacagtgatgttgcaatagtaataggtggaattgaagcgagtttaagaagatttgcacactatgattattggagtgataaggttagaaagtctatgttaatagatagtggagcagatttattagtttatggtatgagtgaaaagcagattgtagaagtagccaatgcacttaatgatggatatgacccaaaatatattagacatattgatgggacatgctatatttcagatacattggaagaaatatatgataaatatatattaattccatcatataaagaaatttgtgaagataaaatgaagtatgtagaagcttttaaaattcaatatgatgagcaagacccatttagaggtaatataattgttcaacctcatggaagtaagtatctggttcaaaataagccagaaaaaccacttagtagagaagaactagatgaagtatatggattaccatatcagaagacataccatcctgtgtatgaaaaatttggaggaataccagctatagaagaagtaaaatttagtatagtaagttcaagaggctgttttggtagttgttcattttgtgcaataacatttcatcaaggtagagcagtgcaaagtagaagtgaaaaatcaattattgatgaagcaataggaataacaaatttagatgattttaaagggtatatacatgatgttggaggtccaacagctaattttagaagaccagcatgtaaaaaacaaattactaaaggtgcttgtaaaaatagacaatgcttatctccatcaccatgtaaaaatttagatgcagaccacagtgaatacttacatttacttagagctgtaagaaaattacctaaaataaaaaaggtgtttgtgcgttctggaattagatacgattatgtaatggcagataagaacaataaatttcttagagagttgatagagcatcatgtaagtggtcagttaaaggtagccccagaacatatatcagaagaagttttaaagtatatgcaaaaaccagcaggaaaaacttatgataaatttagacagaagttttttgctataaatgaagaattaggtaaaaagcaatatttgataccctatttaatgtctagtcaccctggttctaccttaaatagcgctatagagttagcagagtatttaagagatactcactaccaaccagagcaggttcaggatttttatccaactccagggactctatctacaaccatgttttatacaggtattgacccgcttacaatgaagccagtttatgttcctaaatcaaaacgtgacaaggcaatgcaaagggctttattacaatatagagcacctagaaattatgatttggtatactctgcgttagttgaagcaggaagagaagacttaattggttttggacatagatgtcttataaagccaaaaaatgaaaagccttattttaatagaaataattctaaaaaaaatgtatctaaaggaacaaataaaaacaaaaaaactaatacaaataacagaagtaataaaaatcaacaaaaaagttcaactaaaaaaaagaaaaaacattaaagtataaataaaaatacttaaaaaagaaggattattcgataaattaacagaaattagtataaataaatataattattttaatgacgttacctttgggaggaagagatgaaaaagtatatttctataatattattagtggtggtgactatggttgttttggtaggatgttcaccaggaaaagataaccctaaaaataaggagctatcagttgtcaaacaagtaaaagtagctgttccagatggactaccagcagtggcaatagctaaacttgcaaatgaaaatccagagattaaagaaggatatgaaacagtgtatagcattgaaaagacacctgaggcgatttccactagagtgatgaaaaaagatgcagatatagctatagttccttcaaacatggctgcaatagcgtataataaaacttcatcatataatattgttggaactgtaggaatgggttcactttatttggtgtcaacagaaaatataaaagattattctgatttagttggtaaagaagttggatgtactggaaaaggacttactccagacataactataaaaagtcttttgttacaaaaggatataaattattcaaatataaaatttaattatgtaaattcagcaagtgaactggtaccattattggctactggtaaagttaagacaggtattgttccagaacctgcacttagtgctttgatgtctaaaaatccagacataaaaattataaaaagtttaaatgactcatggaaggaagtaagtggttcaaaagacggttatcctcaatctactttaattgtaaagtctgaatttttaagagataataaagattttgttgattcttttgtaggtcaattatcaaatagtatagattgggcaaacaaaaatcctgaagaattaggtgcatattctgaaaaaataaaaatatctactgaatcaaagataataggaaaatctcttgaaagagctaatttaaaatatattccagttaaggacatgattaaagattataaaaattactatgagaaattagctaattttgatgataagacattaggaggcaaagtaccagatgaagcaatatactttgttgagaaataaaaaaaataaagaacaatttatagataaaatggaggtaacactttcttgtgttatcctcttatttttatggcaaattattgctttaaaaattgataatgatatttttttaccaacagtaggtcaagtatttaatagtataaaagagattatgctaaattctagtttctatatagatatactttactctatggggagatgtttttttagttttttactggctatgatttttgccattatactttcaatagtatcttatttaaatagattttttagaaacttattaaagccaatcaatgctttgacacgttcaataccaactatgatattggtagtacttgcacttatttggtttgaaaaggatagtaccccttttatagttggatttactatagtttttcctatattgtatgataacgttttgggcgctatattgaatatagacaagaacttattagaaatggctaatgtgtataaaataaggtttatagataaggtgttaaaaatttatttaccagccataaaatttcaaattatatctatactagtatcaacattctctttaagtttgaaagttgctatagcaggagaggtatatagtcaacctacatatggtattggaactatgatacagactgaaaaaattaactttaatacatctggaatatttgcatggataattattgttcttttaatatctgctattttacaaatagcccaaaagtttttagcaaggagagcttttttatggaaaagataaagttgagtattgaaaatataaataaaagatatgatagtcgtattatatttagagattttaatattgatttttatgtaaatgaggtaaattgtatccttggaaaatctggttgtggaaaaactacactcttgaacataataagtgggattattaaaaatgacaccaacaatctaaatatcaaagaaaatttaaatagagtaggaaataagcttgaagctagttacatatttcaagatgatagacttatagactggttaacagtagaagaaaatataaagatagttgtaaataaatactataataaaactcaattaaataaaatttgtgatgaatacttggaattggttggaattagtgattataaaaaattctatcctcagatgcttagtggaggtattagacaaagagtaaatattgctagagcttttatatatccatcaaaaaacattataatggatgaaccttttaaatctattgatgcaaagaatacacagcttataatggataatttcagaaatatattaagaaaagaaaagagaactgtattatttgtaactcataatattgaggaagcattgtttttagcagataggatatttattttaggagactctccaattagaataaaaaaaatattaaaaaattctaaggaattggaaaaaaatgaagttttgaagttgatatagagttataataatactgtcgttttaaaatatatttggttaaaatctataagactatattaaaatagtacagaatattcaaaactgtgtataatgttcgtattttataaaaaggaagtgaatgtatggttaagactaatgctatgagaatattagattcaaataagattgattataaagtaatgtcttatgaagtgaaaagtgaacatgtggatggtgttgaggtggcacatgatataggaagagatgtaaatgaagtgtataagacattagtaactcaaggagttagtaagaatatatatgtatatgtaataccagtacatgaaaacttagacttaaaaaaggctgcaaaagtagctaaagagaaaagtgtagagatgattcatgtaaaagatataaataagcttacaggttatattagaggcggatgttctcctataggtatgaaaaagctttataaaacttttgtaaatgaaagtgcaaagaatttagatacaattattgtgagtgcaggaaaaataggatatcaaatagaactatctccatttgatttacaaagacttataaaagtagaatttgtagatgtaataaaaaaataagaattacatataaaatatagagcttatattcttaataataggtgttgtaatattaataaaatgaataataattttaaaataaatattcagttacttatgtgtaattggtataaaaatattgagaaattttaaaaacaatggtaaagtgtaagtataatcacgaatattttttataaagtaatggagggatgttcgcttgagaaaaataaaatctgaacaaatcgtcgagcaggtaaaaaaactttgtatagaagcgagcctatatttaggagaagatgttttaagttgtataaaagaaaaagcgaaaagcgaaaagagtgaagttggaaaaaatatattgaatatattagttgaaaatgctgaaatagctaaagaaaaaaatataccaatatgccaagatactggtatggctgtattttttgttgaaataggacaagaagttttaattgaaggagacacacttactgatgctataaatgagggagtaagacaagggtatgaagaaggctacttaagaaaatctgttgtaagtccaattaacagagtaaatacaaaagataatacacctgctgttattcattatgatatggtaaaaggtgataaaattaaaatagaatttgcagctaagggatttggaagcgaaaatatgagtaagatgaaaatgttaaagccatcagatggattggaaggaattaaaaaattcataatagatacagtttcagaagctggacctaacccatgccctcctatggtaattggagttggtataggtgggactgtggacaaatgtgctcaaatagctaaaaaggcactttttagagaactaggtgaatttaataaggacgaaaatatagcaaaacttgaaagtgaactattaacagctattaataaacttggtataggacctcaaggcttaggtggtactacaacagctttgggattaaacatagagacttttcctacacacatagcaggtctacctgttgttgtaaatataaactgccatgcatcaagacataagaaggtagtaatttaggaggaaaataaaatgataaaaataactacacctgtaaatgaaattgatatagcaaaattaaattgtggagatacaattagtttgagtggtatactttatacagcaagagatgctgctcataaaagattgatagattgtataaataaaggtgaagaattaccatttgacgtatatggtcaaggaatatattatgtaggacctactcctacaaagccaggagaagttataggtgctgcaggtccaacgacgagttatagaatggatgatttgactatacctcttttagaaagaggtcttagattgatgataggcaagggaaaaagaagtgatgaagttatagaaggtatgcaaaaatacggagcagtttatcttgctgcaataggaggagctggagcgtatatttcaaattcaataaaatcatgtgaaattattgcatatgaagatttaggagctgaagctataagaaagattgtagtagaagaccttaaacttacagtagcaatagatagctatggaaataatatatatgagcaaggtcgagcaatttatgaatgtaaataatgtttagaaataaatatgaatatcaaaattaaaaatagttgtgtatattttaaggaggaaaattgatgtctaaggattatgcaaaattggcattagaaatgcatgaaatcaacaaagggaaagtaagtgtagaaagcaaggtagaagttaaaactaaggatgatttatcaacagcatatacaccaggggttgctgaaccttgtttaaaaatacatgaaaatcaagatgatgtttatatatacacttctaaagggaatctagtagcagtagttagtgatggaagtgctgtacttggattaggtaacattggtgctgaagcatctatacctgttatggaaggtaaagctatattatttaaacaatttgcagatgtagacgcttttccaatatgtttaaagactaatgatgtagatgagatagttaaatctgtagagttgatggagcctgtatttggaggtataaatttggaagacatatcttctccaagatgttttgagatagaagagagattaaaaaaatctttaagtatacctgtttttcatgatgaccaacatgggacagcaataatagttgcagcagccataataaactcaataaagttaattgaaaataaaaaaatagaagatttagaaatagttataaacggagcaggagctgctggtatagccatagcaaagatactacttaatatgaatgttaaaaatataatcttatgtgatagaagtggagcattggaagctagtatagaaaatctaaactatgttcaaaaagaaatgttaaaagtaacaaatataagaaatgaaaaaggacctttaaaagatattataaaaggaaaagatgtatttattggtgtttcaggtccaggagctgttacaaaggaaatggttgaaagtatgtctgagaagccaataatattggcaatggcaaatcctactccagagataatgccagaagaagcaaaattaggtggagcatttataatgggaacaggtcgttcagacttccctaatcaagtcaataatgtactggcttttcctggaatatttagaggagcattagatgttaaggctaaagagataaatgaagaaatgaagatagctgctgcatatgcaattgctaatacaataagtgatgaagaaatatgcccagagtatatattaccagatgtatttaataagaatgtagtaaaaaatgttgctaaggcagttaaagaagcagcgataaaaactaaagtaaatagaatataaatttttataacttattaaaaactagaaaagtataaaagactagtgaaattatgtacagtgggatgattttattagtctttttattttaaatatgacacaataatgtcatattaagcttgatataattttaatatggttaggagccaaagaaaaatataaggagtgatttaaaatggaagaaactaaattttgccaatgctgtgcaatgccaatgggacaaactgatgaattatatgggacaaataaagatggaagtaaaagtactgattattgtagttattgttttaaagatggtgagtttacagctgatataagtatggaagagatgatagaagtttgtatccctcatatgcttcaaagtaataaggatatgactgaagatgaagcaagaacaatgatgaacaatttctttccaacattaaaacgctggaaataattttatgcaaaattagttatatgcaaaacatgaaatatggtgttgagaataaggggtggtgtgctttatagcataccacctgttttgttacttgctagttcagttattcttgtatgcttaaatatgttctcatctctctttctattttaaattgtaaaaatctaaaatatgttatttatattctacttctttatccatgtctttttctacctcaagtcaaatacaactacaaaatcatcattttcaattcactgtttaatagaattaacagataaagagttataaaattttctattttttatataaaataatacaggtcaagctgacttctagctacttgggatagtgtatatatttatgatagttataggagtaataccaatcattagactgttgatttgtgtagtcttttgtaaaaacatttgttttaatatattgagtttttgaaaaagtaaaattataattataataaattaagtgtaataatgtattagaagtaaaaataattaaaatagaggtgattaaatgagcagtatattgttagttgaagatgatttaagcttgatatatggattagagttctctatacaaaaaagtggatttagtatagacatagcaaggacagtaaaagaagctatgcaaatgtatgaggaaaaaaattatgacttattgcttttagatgtatccctacctgatggtaatggatttcagatttgcgaaaaagtacgagaggtttctaatatacccattatatttttgactgcttcagatgaagaggtaaatgtagtgatgggtcttgatatgggtggcgacgattatataacaaaaccttttaaattaaatgaattaatttcaagaataaaagcattacttagacgttataatgttgcaagtaatgtgaatgaattaagttcaaataatattactattaaattacttgaaaatcgtgtttttaaaggtgaatttgaggtggaacttactacagcagaatataaattattgtgcttatttatgaaaaataaaaatattgtacttactagaaaaaacatattggacaagttatgggatggaaatggtagctttatagatgacaatacattatcagtatatgtaagacgattgagaaataaaattgaagataatcctgaaaatcctaagtttctattgaccgttagaagaatgggttataagtggaatgtaattaagtgagggtattaatatgaagatattttctaataaagatataaaaatattttttttaattcttatatctattttagtaatgtttattatagtagggcaaatagtggttataagtataactaacaattataaaaaaacgttgatagaacatgattataatatagctggatacttatatagtataggtgttgataaatctaaaataccatcagcatttgttgcacatgaagataaatatattttaaaaggaaaagaaatactagatacagctggatatggatttgatatagatgttagctttacaccaagtgtaaaattgtttcaaagtaaatatataaaaactatgtctatctatttattagtattttttactatgattattttcatactatatatgtatttttttaggcaacaaagtaagatagaagaggctagttataaaattgatttatttatgaatggaaatataaatgaaagactaaatacatatgaagaaggtagcttatcaaaattatttagttcaatagatgttatgtcgacatctttaaatacacatatattaaaagaaaaacagagcagagaatttcttaaaaatacaatttcggatatatcgcatcaattaaaaactccacttacagctttaataatgtacaatcagatactacaagaagaaagtcataatagtgatgtcgttgaagcttttgtacaaaaaagtcaaagtgaactagaacgcattgaaacattgattaagaatttactaaagattacaaagatagattcaaaaacaatagttctcaataaaaataatgttaatcttaaaaatttaattgtcaaaattttgtatagctttgaaactagggcagaaaaagaaggaaaggttatttctataaatggttcagaaaatacattgttgttctgcgattatgaatggatgtcagaggctttaagtaatcttataaagaatgcattagataatacaaaagagaatgataaaataacgatagagtggtttgagacgactataaccaccattgtttcagttaaagacactggaaatggaatccatgttgaggatattcatcatatatttaaaaggttttatagaagtaagttttcaaaagataatcaaggtttaggactgggattaccactagttaaatctattgtggaacaacataatggtactatttctgtagaaagtaaactatcacaaggaagtacattcaccataagttttttaaagcttactaatatgtaagataaaatacatcttgcagtaaggtatatagattattattatattaatcaattagaaaggtgagagagaaaatggatattcttgtggttaataatttatgtaaaacatatggaaatggatatacaaaagtagaggcattgaaagatgtatcctttacagtttcaaaaggagagtttgtgactgtagttggagaatctggttcaggaaagagtacactattaaatctcttaggaggtcttgatactccaacatcagggagaatatttattgatggtaaagaaatatgttcaatgaaagaggaaaaacagactatttttagacgtcgtaacatagggtttatatttcaggcatataaccttataccagaactaactgtggagcaaaatataatattcccattgttattagattataaaaaaccagatactatttacttagatgaagtattgactattttaggtcttaaagataggaaaaatcatcttccaaatcaattatctggtggtcaacaacagagagttgcaattggaagggctttgattacaaagccaagtattatactggcagatgagccaacgggaaatcttgacagtaaaaatagtaatgatgtaatttcacttttaaaagtgactgcagaaaagtataatcaaaccattattatgataactcataatacgaatatagcttctacagcagatagaatactacaggtttctgatggtgtgcttacagacctgggggtgaatagagaatgagaagctacttagaattagtaccacaatatgcaaaagtacataagaaaaaaaatagaactacaattttatgtattattattgcagtatgcttagttactgctatctttggacttgcagatatggctatacaatgtcaaaagatacaatttattaaagatgatggaaattggcacatagtaattagaaatattgatgaaaagtttatatcagaaataaatagtagagtagatatagctcaccatggtagggggcaagtcgttgacagtggagagtttaaatcaaaggagattttgatacaaggtttagatgaagaagtagcaaaacaatttaacttagaaataataaggggtcgttatcctattggggagaatgagactttaatagatgaggatgcagttaaaagctttaatctaaaaataggagattttatcaaaataaaattagcagatggtagaaataaaaattataagatagtaggtgaatattcatcaatatcaagcttaagagctacagataaacatggattaatactttcaatattgggtacacaagctattaaaaaatcagaaacgtacgattattattatattacatttaaagaaaaggttaatattagaaaagccacttctgatattaaaaataccttcaatttaagtgataaacaaatcggtaaaaatgaaagattactttctattataggtcaaggcgactctgacttttctaaaccactgtatttaacagcaggattactttttgtacttgttttagtagcaagtattatcatgatatataatagttttaacatgagtgtaattgagagagttaaattttttggtctgttacgttgtctagggtcatcaaaacatcaagttaaaaaatttgttgttttagaaagtttaattttaagtataaaagctattccaataggcttagtattaggaagtcttgtaactattatatcttctatatttcttaagtatgttaatgagttattcagctcaatgccaattttaaaagttagttttattggtattgcatttggaataattgtagggtttttaactgtaatattatcagctattattccagcaaaaaaagcttcccgtgtatctccacttagcgctgtacgtgggaatctaatgtccaaagaaattttaaataacgggaagacaagtaaagttgcaaatacaggaagttttaaaattgagacttctatgggattaaatcatgctttttcaagaaagaaatcttttgtacttatgacttcttcatttgccattagtattatactatttttaggttttagtgtgcttatagaccttatgtatcaaggacttaagcctatgaagccagaagctcctcatatatctattgttgaccctaattttaagtctgttttaactaaggaagatattaatgaaataagcaatatcaaaggagtaaagaaagtatacagtagaatgatgacggatatagaagctacatataatgggaagaagacaaaatcacaattaatttcttatgaaaagtatcaatttaattgggcaaaaaaatatctattaaaaggagaagttaatgaaaataaactacagtcagaaaaccttgcattagtagaagaggggcatggatttgatataggagataagatatatattaaaaatagaaatgctgaaaaagagttagaggtaggaggtatactttcctcaattccatttgaggctaaagataaatatattggaaatattataacatctgaaaatacttttacgaatataacaggtataaagggttatataataatggatattcaggttgataaagatactcctggagatttaattgaaaatataagacgtgtagtagatgataacttagaggtcagagataaaagacaaagtaacttagaggttaaaaattcgttttatactatggcaacatttgtatatggatttgtgtttattattgcgattataagcatgtttaatatcataaatagcatgaatataagtgttacaagtagaaagaattactatggtgttatgcgtgcagtaggcatatccaacagacaattaagaagaatggtaatagtagaggcaggttcatatgcaatgagtggttgtttattaggtagtatactaggattaatgttacataggtatatgtttatatcgttagtaagttcaatgtttcatttagagtggcaagtaccttttaatttactacttatcactgtactaactatgataataataactttattatcagtaagaaaaccagtcaaaaagatttgtgaattagatataatagactcaataaatgcacaataaatatagctgttgatttaaattaaaaaaacgaagtaaaaatgaaatagaaaatatttttcatttttacttcgttttttatattataaaatttttgttatgttacaaaatttctataaagatgatgtgaatctaaacattatatgacaacgtgagcatttaagttaaaatattttaaatatactattttagataagttccttcttcatcttgataaattaatccttttttcataagcactccaagagctcgtttaaaatttttcttacttgaattaaataatatagaaatatctttagggtcagatttatcattaaatctcatatatccatcagaaccctctaaataacttaaaatcttattttctaaagtatcaagttcatcctttctatttcctctaggagaaagaccaagttttccatcttcatatatttttatgacatgtaaattttcaagaacatcaccagcttttagttcagtaaagtactcattatgaagtattacaccagcatatttattgtctacacatatcattgcagaattattagtttgaaatccatatacaactccagttacaatatctcctacattgtaagtatggtctgttaataaatatgaatctatatctgtagtagcagcaattcttttgcttttgtctaaatatatataaaataaatatttttcgtctctaaatagtggataagtcttagctttaaaaggaactagtatgtctttaggaagtcccatatctataaaagtaccaatgtccgtattatcaactacttttaaatgtgctacatccccaaccttagctaaaggcggtattaaagttgcagcagttctgtcatcagaatctttaaatatgaaagcatttacttcatcacctatgtttatttcattttttccgattaatctattatgaagaagtatatcgtcttttgtgttattagtttgtccatccaaaaaatatccaaattcagtttttctttttactgtaagtttattaaaatcacctatgtttatcaaattaaaatcatcctctcattttatatttataatttagccataatatacttatgtagtagtttgtcacagtatctatattagtattagtgaaatttacaataaataatatagttatttatgtatttttcaattctctagcttcttatatagtataaactccaatttcttttttgtctttaggttttactaaaatttttacaaaataagttaaaaagtattgaaataaaatttcttttaaagtataattggtatataccaaaattggtatataccatatcgaaaagtggtgactatatgaaaatagtaaataaatctagtaatataccattgcatactcaattaagttcaataataagagagatgatagaaactggtgagcttaaagagggtgatgcaataatgccagaaagagaactttgcaacatacaaaatgtaagtcgtatgacagtaaataaaaccattgttggattagtcacagaaggacttctttatagggtacaaggtaaagggacattcgttgcaaagcaaaaaaagaagtatcagttttcaaatgtaaaaggttttactgatgttatgaaagaaaagggagtaaacataaaaacggatatattatcctttgagatggaactaccagatgatttagttaaaagaaagcttggaataagtgataatactacaaatatatataagattgtcagacttagatatactgatggagagccatttggattagaaatagtatatctatcagaagaaatgtgtaaaggtctaacaaaagggatattggataattcttcattatatagggttttaaatgaaaaatatggctataagatacaaaaagctgaacaagtaatggagccagtaatactttcagatgaagaaagtaagcttcttgaaacagatgaaggtgctttagctcttaaacttcatagaaattcctataatagagaaggtagccctatagaatataccatatcaatatttagaacagataaatatcaatatgaaatagtattgagtgagtaggtgaataatatgaaatgtttaattaatggaaagataatattaaaaaatcaaatcttggaaaataaagtattagtatttgatgaaaaaataattgatatagctgatagtgtaccaaaagattgtgaagttatagatgctgatggaaaatatatatctccagggcttattgatattcatatacatggaaatatgggaaaagatacaatggattcgactgatgaatctattgaaacaatttcaaaatcaattatgagacatggagtaacatcttttcttccaactacaatgactatggataaagaacatgtttatgatgcacttgaagttattaaaaaagcccaaaatagaaagcttgaaggggcacaagtattaggagcacatttagaaggaccttttataaatgagaattataagggagcacaaaatgaaaaatttataataaattcaaaatacgaatttataaaagaatataaagatgttataaaagttataacttatgctccagaaaaagatattgattttgattttactagagaaataaaaagatgtacagatatagttttatctattggtcatagtaatgcaaattatgaccaagctaaagaagctataaatttaggagtaactaatataactcacatgttcaatgcaatgactggtttaaaccatagagacccaggcgttgttggtgcagcacttacaactaatgtgtacagtgagctaatagcagatacaatccatataaataaagatttatttcaatttatactaaataataaagggaaagaaagactgattttaataacagattctatagaagctggtggtcttgaagatggcaattattctcttggaggtcagaaagtcatagttaagggtaatgaagctagacttgaaaatggagcattagctggaagtgtgttgtctttaaataaaatggtatttaacttcttagataatacaaaccttaaagtgaatgaagcaattaatttagcttctttaaatccagcaacatctttgggaataaatgacaaaaaaggaagcttagaaataggtaaggatgcagatatagctgtatttgatgagaatttagattgtaaaatgacactttgcttgggggacgtagtatataaaaatatatagtatacaaaacaaactttaaagacagtaaaaacaatataaaaaataataaattaaacttacattagttaaagtagtagttaaaatttaggaggaataagatgagagtattagtgtgtaaagattatgatggaatgagtaaaaaagccgctgaaatgatagcagctcaaatagttttaaaaccaaattcaatactgggactagctacaggaagtacaccagtaggtatgtatagagatttagtaaaaaaatacaatgataatatagtagatttttcagatgtgatgagctttaatttagatgaatattataagttaccaatatctaatgaccaaagctatgattattttatgaaagagaatctatttaatcatgtaaacataaagctagaaaatactcatctaccaaatggaatggctgatgatattgaaaaagagtgtctgaactatgaagcttctatagatgcagctggtggtatagatgtacaagtacttggaataggtcgtaatgctcatataggttttaatgaacctgatactaaatttgcaaaaagaactcatgtagttgaacttacagagtctacaatagaagctaatgcaagattctttaaatcaagagaagatgttcctaaaaaagctgtaagtatgggaataggttcaatattgaagtctaagaaaatattgcttttagcttcaggagaagaaaaagctgatgcagtatataatactgtttacggagatataactccagaagttcctggttctatacttcaacttcataaagacactatagttatagtagatgaagcagcagcaagtaaactgaatccaaaagattataaattagtataagaatagaatgtagtttaagtgaaaaatagctatcattgaataatcaaatttatttaatgatagctatttttatttaaattttttacttctttttatttaaattagttattattgtttaaattacttgcttattactttttacgaaaactcgttatcaagaagtatccgaataagatgttaaaaattattatgtttagtgggattctatcaagcataataaaattacctataattgggatattaccaattggaaacataaagaagaatacaggcatcagtgatagtaaaaaagatggaaaacaaagaagaagtaatcttggaatatcaatataccaactaccatcctttttgtattctctaatcaataattcagttcctagtaacaaaccaataccaccagaggaaattaaattaataaaaatgtatcttttaaagtcttgcatataaccagtgtgaaattgagtatagaaatcataatttaatttaacggctaaaaaatatataagcaatagaatgattaaaaataaaagatatctaagagcttttttcattttaaattctcccttcagaaatactttattcagttttattttgttggaatctgattttatcatttagtttaagaaatccataatattagtgaagaatgaaataagtattatatatgaataaatatttttagaattaaggtgaactgtagtgcttaatataactataatattaattgtttgaatattcaataaaaagtttaaaaaatatcaattttgatataaactgaataaatacagttgaatattaaattattattttatcaaaaatatgcaaagtactacaccttcaaatatcacctaaagtaattaaaaggcaattaaagtgaagtagttcaagtatttctaaaatgagtttaataaattctataataatttattttttgccttaaaattgccttaaaatccaaacaattttaaaactaatgtactataaaaagctggtataatttaaatatagtaaaaaataagatttatcttatctattgggatttaattatttaatcaatatatttataccatttaatttaaataaaaagtctattaaggagtgagcttatgagtaagttaatttatatagcagatgatgaagataatataagaaatttggtaaagacattcttaaaaaatgaaggtcatgatgttatggattttaaaacgggtgatgaacttttagaacaatttaatataaaggagtgtgacttagtaatactagatataatgatgcctggctcaagtggttttgaagtatgtacaaaacttcgtgagaaaagtacagtcccaataatcatgcttactgcaagagatacagatatagattatattacagggataaccttaggtagtgatgattattttacaaaaccatttagcccaatgtctttggttatgagagtaaaatctatatttagaaggatagagtttgaaaagaaacaaaattatgataaatatagtaactcgatagatatggaattaaaatttggtgatgtaataataaataaaaagaataaaatcgttacaagtaaaaatgtaaatatagaccttacaccaaatgaatataatctattgacttatttgtttgaaaatatagatagagcagtttccagagatgaattattaaacaaaatatggggatacgatatagaagttgagacaagggctgctgatgatacagtgaagagattacgtaaaaaaattttagatacaaatattttaatagaaactgtatgggggtttggatttaggttgaaggagaaaagttaagatgaataatggaaatgacaagaatagaattggaaagattaaatccaaatttaaattaaagttctcaaagaaaaatataagcataaaaactaggattttgttgagcatactttgtttgataattatagtatttatgataatattagtatcttttaatgtatttcttgatacatatataaaaacaactgcgaatgaagaattgacgaagtctacagaaatagtagaacatatggatagtaattttagacctattaagccaccacaagatgatggaaagcttcctcccaaagtattatctaattttatgagaaatgtacaagataaagttaggatggcagaaacacaatcagatgctgatgctatggtagttgattctaagtataacctgatatttccaacaagagaggatgatttcttaaaaaatgttgatgagatggagctgattagggagtgtattcaaaatgaaaaattagatttaaattcagatgaaaatacacggatatctaccagaaataaggattattatatttcaactgtaaaaattactagtatatatggtgaacaagacaaatatcttatactttttatagacatatcaaaaactctaaatctagcacaaaagataaatattgtattaatatctgtaatgtgttttgctggaatattagcaatatttacagctgtgattttatctgagaaaattgctaaaccgataaaagagttgtgtgagtttgcaaaaaaaatgggtcaaggagatttcaaaagaacctactttgacttttcagataaagaattagtagagctctcaactgttatgaataagagtgctgagtatctggataagtatgataatgaacaaaaaatattttttcaaaatgcatctcatgaattaaggacaccactcatgtctattaaaggttatgcagaagctataaaatataatgttatagatagtaaacatgcaagtgatataattcttgaagaaagtgataggttaagtgatatggttgaagatttattatacatttctaaaatagataatataactaaagattttgaacttgtagaatgtgatttaagagaagtattttcaaattgtggagctaggcaaaatgtaagagctataaataaggggataaaatttatttatgaatttgatgaagaaatggttttatttgaatgtgatgaaaaaaacatttccaaagcatttatgaatcttatagaaaatgctttgagatacgctaagagtgaaataaaaatagtgtgtaagtataatcaaaaaaatatagttgtgataatagaagatgatggaattggaatcaagaaagaagatttacctcatgtttttgaaagattctataagggagtagggggaaatcatggaattggattatcaatagttaaatctattgtaaataagcatggtgggcgtatatacgtagaaaatggcaaaaaaggagctaagtttactatattatttaaattgtaaaaaaattagagaaaatataaagatgtttgaagttgttttttatatatatctgttgtatactgttgaaaaaagaacaatattaagctgacatatattacaataattgacatttaaagtaaatgcttaaatatagatacgaaaggaaaagtaaaatctgaagtgtatttaggtttaagtaagcttcttattttataaaaaatatgtatgaaagaacagctgatttttaatattacaaatttagtaacggttgtatttgaagcttttgtcatccatatgtttttatcagactttttaggtcagaaagaagggtatataaaagttgtaagatatgctaaactgggttttataatatgtttaggattctgtaatttaataactttaaaccctaaaatcacaatgcctttaatttttatccttattttttcaacatcatttttatataaaggaaatttaaagacacgattgtttactactgttttattaagtatattctttatactgtcagaaattgtagttacaagtatttttgttttatttgtaaaagaaggctttgaaataatgcttgaaaataatagtataagagtattggcgacaattttatctaaaattgtctttttgttgacttgtaaaattatttgtctatttaaaaaagatgtacatttagatatgcccataaagtattggctccctttatttttaatacctatatttagtttatttctgtctgtttctatctttgatgtaagtaaattttttagtcttgaaagtttaaaatttctaagtttaatatctagtgttggcattttatatattaattttattgtattttatttatttaaatttattatagataaaactaaactatctatgaaatatgaaatacttgaaaaagaaataattcataaggaagaattaagacttagtaatgagtgttataaaattattgttgaacagactgattctgtcgttttcgaatggaatatcaaagaaaataaatcatttgtatcgcaggcttggactgaaaaatttggatataacaatgcatgtaagaatatttttaaagaaattaaagataaagacttagttcattctgaagataaagctatatttgaaggttttcttgaaagtattaaaaaaaagaatatacacagtcaagcagtatatcgtttaaaaaaatctaatggtgaatatatttggtgtagaacatcaattacaagcatttataatgatgaaaatgaacttttaagagttgtaggagtaattgtagacgtagatagtgatataaaaaaatatgaagagttaagaactagagcagaaagtgactcattgaccaatatatacaataaaggtacatttgaaaaattagtggaagaaactatagttatgaatacaggtgataaaaaagatgcattattcattattgatttagatgattttaaagaaataaatgataattttggtcatccatttggtgattttgtactaaaaacatttgctgataagatacaagctagttttggtaataaagacttagtcggaagaattggtggagatgaatttgttgtatatatgcaagattatgttacagaagtaaatttgcataaaaaagctaaagaattaaatagagtactttcggataattacactgatttgagttttagttttgattcttctgtcagtataggtattgcaaggtatcctcaagatggaacttcattttttgaattgtttaaaaatgcagatagagcactttatagcataaaagcatcaggtaaaaattcatattgtttatttgaagaagaactatatgtacagtgaatttgaatttagattttatgtgagagtaagatttatatatacttgtggctgtctgatttataaaatatgttactttgtatatttttatatgtttcagtaaggttaattaacataagcaaaggtgtaagtaaatttatattagtttaagtttacttacacctttataaaaataaattttgtaaatttaaacagttggttttataaggatttttatttattttaatatcttagatattcctttttgtattccttagagaaaataaataatgaaaggagtacagaaaaaattaaacatcctaatataccacttgaattaagtcttaaagcattaaagtttaaaaaagcattatttaaatcggtatccaaaagaaaaggatgctttgatttgctatatatggaaaaattaaaaatatattcataatcaaatttataaaattaatatctttccatcctaacattacatttacttagattaattattattataaaaataaaaatacaaataatagattcatttacattcttaaatgattaaagctctttaccctttaaacatgcataacatatcgttataattccagtaaataagactaaaatgcccattcctaaaattgcagtttcatcatctattactccaaatgcttttaaagtaacttatttcgctttgtataataataatttgtctctttttatattttaacttctgctgagatttgagttagatattcgttagaatctcgcacacttatatcatatagaagatattcttcataaacaaaatccccaatacgtaaattattctgattaaaaaaatttaataacttttcataagccttgtaaatagtttcataactacctttatgataagcagttacataaagtccctttggtttgattgatacaggatatttcttgtactctttattaacttttgtaaataaatatgaatatgattcaaagtctttattaattatatcttcacctttaatgattgagccaatcgtaccatagtcactcaattcatagttgtccataaagttaatacattcatataaaaaattttcttcctcatctcctaaaaactgttctttatatgtaataggtgttttgaccaagtactcttcctcatgttcttttaaagtaatagtattcgcatctatattacaggcatttttagtgaatgaaatagtagattccattagagcttgaatattatttagtttttcaatttcatttttaatatcaatggttttcttttctaaaagctcaattagtaaattaggtgttcttttgtctatataagctttaatttcttttaaaggcatttttacttccctaagtgaagaaattataccaaaaatgctaagttgatggtatgagtagtatctatatccattttctttctttaattctggtgagaaaagacctatatcatcataatggaaaagtgtttttttattgattccacaaatctttgcaaattctccagttgtaaaataattttttgaaacttgactcataattataattcctccttgactatcctgttacagtatagtttatcatagtattttgtaaaggagtgtgattatatgaaaaaattaattcattttttaaaaccatatagagttttaattgttgtagttttgatatttacgtttttacaaacacttggaactttgtatataccaacacttacagcaaatatagtaaacaatggtgtagtaaagggagatatagattatattgtaaaaacaggtttaataatgatgatagtagctggtataacagctttatcagctgtgttagtttgtaaagtatcagcaaatctttcatctggattttgtagagatattagagaagcagtatttgtaaaatcacaagatttatcaataaatgattttaataatataggtacagcatcaatgattactaggagtactagtgatattactttaataggtcagtctgtgtttatgtttattcaattggtattaccagcaccaattataactgtttctggtctattcttagcatattctatagataaagcaatgacaattattattgttgtagtaatgtttttattcatgctttcagcatttttagttggtaaaaagcttataaagttgtttaaaatgatgcaaataaagatggacaatatgaatagggtattacgtgaggtagtaactggagtaagagttataagagcttttaatagggagcattttgaaaaaaagagatttgatagaactgcaatagattattctgaaacagcaatttcaataaataaagtatttgcagtacttatgcctattgtaatgttaataatgaatttaggtatagtaagtattatttggtttggtgggatgagagtcagtaatggaaatatggagataggtcatataatggcacttattgaatattgtatcttaattttattctatttaatcatgggagtaatggtatttatgtacatacctagagcaggtgcatgtgcagatagagtaaatcagatattagatatagaacctgaaattgtagatggaaatggtcgtaaagatactgtctcagagaggggacatttagtatttaaaaatgtaacattttcatatgcacaatcagaagaacctgtgttaaataatataacatttgaagcaaaatctggagaagtaactgcaattataggaagcactggctcaggcaaatctactattgcaaatataataccacgtttttttgaaattcaatctggagaaatatctataaatggtcaggatgttaagaagattcctcaaaaagaacttagagataagattggatttgtgccacaaaaagcttttttatttagtggaacaatagaagaaaatataaggtatggaaaagaagatgcaagtattgaagaaataaagcatgctgcaagtatagctcaagctgatgaatttatttctgatatggaagacaagtatgactcatttgtagcacaaggtggaaataatttgtcaggtggtcaaaaacagagaatatccattgcaagagcgttagttagaaagcctgaagtatatgtctttgatgatagtttttctgcattagattttaaaacagataaaagacttagaaaagcgttgaaaaatgaaatcaaagattcatcagctataattatagcacaacgtataagtacaatcatggatgctaatcagattatagttttaaatgatggaaaaattgtaggtattggaaaacataaagatttacttgaaaattgtgaagtttataagcaaattgcggattcacaacttagtaaagaagaacttgcataaaatgaagaattaatctgatatttggaggtgtatgatatgagtgaaaaaagaatagatgaacaagatatagaagtacttagttttgaagatggcatgtcagcagaaaaagttaaggatgcaaaaaaaactactaagagattattaaaatatatggcaaaacaaaagtttaaaatattaattatttttatttcagtattgataagttcagcgcttacagttttagcacctatggttatgggaaaagctattgaccaactatttaatggaataaaaactgcagtccaaacaggtacaaaattcagtgtgaattttagtactatgggggggatagtatcaatacttctagggttgtacttaattagtgcagtatttatatatattcaacagtatattatgtcaggagttgcacaaaatctagttcttagcatgagaaaagatttaagtgataaactcaataaacttcctcttaagtactatgattctcataaaaagggggaaacacttagtatagtaacaaatgatttagaaaaagtagcagatagtttacaagaaggattaatgcaacttattacagcagtagttacagtagttggttctattgtaatgatgataagtataagtgtaccacttacaatagtatcagctataacattacttgtttcattgggtattactgttgtaattgcaagaaaatcacaagaaagattctctgaaaatcaaaaggcactaggagagttaaatagcaatatagaagagatatttactggtcaaatagtggttaaagcatttagtaaagaaaaggatactataagaaactttaaaatattaaatcaaaatctttataatgcaagtagaagagcacagttttcgtcatatgcaatatctccaattattagatttataaacctaattggctatgttattatagcagttgtaggtgggatatttgcatcaactggagcaatgactcttggtagtatacaagcgtttattcaatatgtaaatcaagcatcagagcctactacagaaatatcttatattgtaaatatgcttcaagcagcaatagcatctgcagagagagtttttacagttatggatgaggtggaagagataaaggatgaagaatcttcaaaggttattagcatgcctaaaggtaaagtacaatttgagcatgttaaatttggatatagtgatgattttattcttatgaaagatattaatatcaatctaaatgcaggagacaagattgcaattgttggacctacaggagctggaaagacaactcttgtaaatttacttatgagattttatgagatacaaggtggaagaattactattgatggtgttaatataaaagacttaaagcgtggagaacttagaactatgtttggtatggttcttcaagatacatggctgtttaatggaagtataaaagaaaatattgcatatagtaagtcagatgccacaatggatgaaattgtaagagcagcaaaatcagcaagagtagaccattttataaggactttaccacaagggtatgacactatattgactgaggatgcttctaatctatctcaaggtcaaaagcaacttctaacaattgccagggcaatactttcagacccatcagtattgattcttgatgaagcaacatctagtgtagatactagaacagaggtagaaattcaaaaggcaatgaataacttgatgaagggaagaactagttttgttattgcacatagattatcaactattcgagatgctgatttaatattagtaatgaaagaaggcactattattgaacaaggaagccataaggaacttattgaaaagaaaggattctatgaagaactttataatagtcaattttcaagtgaatatgatgaagaagttgtatgattatcaagttttaggcaactaaatgattgataaatattaagttaaatatagtaacatgtaaggttatatggaataagagtatttctctatttcatataaccttttttatttatcaaaataagataaaattttctttctaaattagattgaagaaagtatttatcaatataaaagtaaaataatcattattattagtgaagtaaatattgtttgccacatatatgccataaagatgcacttattttacggagatttaacaaagtagtgtaaagtatactctaaatataaaataaatcaaatagagttaaataaattgagaggtgatataaatagtgaataaaaaattgaactatagatttgaaatgaagcacaaaataactgaagcagatgtgttagctttaaaatcaagactctatccaataatgaagaaagatgaaaatgcatctaaagatggaaaatatcttattaggagtttatattttgatactcctgaagataaagcacttttagataaattaaatggcgttgcaataagagaaaagtttaggataagattttataataataactgctcttatataaggttagagaaaaaaatcaaacattacaacatgacatcaaagctatcaactaatttaaccaaaaaagaagtaataaatatactaaacaatgatattgaatttctaaaagagtcgacaaattgtttattaagagaattttatttgaaattaaaatgtgaaagattagaggcaaaaagcatagttgattacaatagagaagcttttatttatccagttggaaatgtaagagttacaatcgatagtgatattaaaacttctgtaaattcgatagatttatttaataaagatttgccgactgtttcggtaattgatgagaatatgactgtattggaggttaaatatgatgaatttataccagattttataaaggatttaattcaaattaataagactacttctacagcagtttcaaagtatgcttcaagtagattatatatttaagaataaaggctatgatttatataaagatatacataaataaggttaaaaaacaaataggttaaaaataaataaaataaaaaataaataagttaaaaataggaaggatgattttaattatgacatttaatgatatttttaaatcaagttttatagaaaacgtatcaggtttttcatttgtggacagtgctttagcactaggttcagcttttttagtaggtttgtttatatatatggtctataaaaagacttatatgggaattatgtattctcgaccattcaatgtgtcgcttgtagcacttacaatgcttacaacttttgtaatattggcggttacttcaaatgtagttttatccttaggtatggttggtgctttatctatagtaagatttagaacagcaattaaagacccaatggatttagtatttctattttggtcattgggttcaggtatagttttaggagcaggtttgattcccttagctgtcatgggttcaataattatgggattgattctaatattcttttcaaataaaacaatatctgaaactccatatatattgatggtaaattgtaataatgaagattcagaagatatagcaactgataaaattaaaaaagtatttactaaatatcaaataaaatcaaaaagtgttacaccagaaaaaggaatagaattagtgtttgaagtaagaatgaaatatggagagacaagtcttataaatgacttgagtcaagtagatggagttactaatgcagttcttgtaagctataatggtgactatgtagcatagagaggagtaatcttttatgaaagataaaaaatttacccttcttatctctattatgattatatttttatgtgctgtagttggagtttatagtacatctagcaacaaaagtgttgatttatatagtgatgtatatattgaaaaatattttaacagagacaaggttatggaagttaatatagagatagatgaaagtgacttgaaggatatgaatgaaaatgctataaaagaagaatttaaggttgcaaaagtaactgtagatggagatacatatggaaacgtaggtataagaactaaaggaaattcaagtcttacatctgtagcaaatagtgatagtgatagatacagctataagattaattttgataagtataatactagtcaaagtatggaagggcttactcaattaaatcttaataactgttactctgacccatcttatatgagagagtttttaacatatagtatttgcgaggaaatgggattagcgactccagaatttgcatatgctaaagtctctataaatggcgaatatcatggtttgtatttggcagtagaaggattaaaagagtcttatcttgaaaataattttggtaatgtaactggagacttatataagtcagatgaaggaagctcgttgcaatataaaggagatgacccagaaagttactcaaacttaatcgttgaaagtgataaaaagacagctgattggtctaaaattacaaaactattaaaatctttggatacaggtgaagatattgaaaaatatcttgatgtagattctgtccttaaaaatatagcaataaatacagctttattaaaccttgatagctatcaaggcagttttgcccataactattatttatatgagcaagatggagtattttctatgttaccatgggattttaatatgtcatttggtggatttagtggttttggtggaggtagtcaatctatagcaattgatgaacctacgacaggtaatttagaagacagacctctcatatcctcgttattaaaaaatgagacacacaaaacaaaataccataaatatctggaagagatagtaacaaaatacctagattcagactatttagagaatatgacaacaaaattgcatgacatgatagcatcatatgtaaaagaagacccaacagcattttatacttatgaagaatttgaaaaaaatataacatcttcaattgaagattctagtgataataagggatttggtaataaagggtttgacaacaataactctaataacagtgattctaataataattctaatagtgaaaataagcgctctggaaatcaaagtgataaaaaagaagttaatgctgaattaacatcaagcgtagtcaaaactaatacagataatgaaactgaaaataaaactacaaatgatagcgaaagtaagaataatacagataaagataaaagtggaaatgataataatcaaaagctagaaggtcctaggggtaaaggaggtaagtcaataccaggggttttggaagttgcagaagatatgagtaaaactataaaatctcaattaagtggagaaacttcttcgacaaagcaaaactctggtgatgaaagttcaagtggaattaaaggtagtgaaaagtttgatgaggatatgagtggtatgccagaaccacctgagggaatggatggtaaaatgccaccaggaatgggtaatatggataagggagatatgaatggtaaaaatggcaatatgaatatggatagaaatcaagataatccaagagaagctggaggttttggcaatagaggaggaggctctgtgagtaaaacaacaacatacttcaaattaattttaggtggagcttcaatgataataatgtcgattatgttagtaggtgtatcaagggtaaagagaagaagatttataaagtcaaaataagattaaaattgaatataaataattttaatactgttaagtctaaatatttacttagcagtatttttttagaaaataatgtgtttgattaataatataaggtaataaattgataaaaattaaatacagcatattaataatacataataaagtaataaaaaaactgtttaagtataataacttatatttagacagtttttttcatttataaataatataaatgaaattgaaaacatttgaaggatagaaattggttggataaatgtataaattacttcaccaaaaaataatgacaagagttgtaactaagttgtaataaaatggtagttatttagcataaaataatgtatcatagaagtatattataaaattaataaaataagatttttgtaagaaaactgctggcttttgatatttagagtgagtagttaaattatgtttaggaggggtagaatttgttgcaaaaagtattatggaaatttttaaagctagtagtcggtttatttatatgttcagttggtatagtattgacgataaattgtaaccttggattatctccctgggatgtatttcatcaaggactttcaaatcatataggaataactataggaactgcttctataattgtaggctctatagtagttattgctgatgtcgttcttggagaaaatgtaggatggggaactgtttttaacatgctactaattggattctttatggatttacttttatatagtaatttaattccagaggctgatagtttatttgtaggaataattatgttgatattaggattggttcttttgtctgttggaatggtattttatatgggaagtggtttaggaagtggacctagagatggtttgatggttgcaattcaaaagaaaacaggaaaatcacttaaattaataagaggtactatagaagttggagcattaatagtaggatttttattaggtggaaaagttggtataggaactataataagtgcatttggattggggtatttcacacaaatggtatttggcttatttaaattagattgtagtaagattaaacatagatttatagtagatgatataaaatttatcaaagtgtatatgagtggtgagaaaaaagctgctgttcaaaatatagttaagtaatttaagaataaattcaacgaaatgttaagtattttaaattaacattttatttagatggataaattgaatattaaaagaatattaaaatatgaggattgctagaacactataaaatatagatttctagcaattttttatttgttcaatgtttttttagtactagaagtcttattctctatttaatgaatgaattaatttataattagagatactaaactttatagatattaatataaacacctttaaactgtgtattttccaaagcctttaaaatgcttgtatttattctaaataaaaaaataaaaaaatgtcaaaaaaactcttgtattatatccaaattttatatataattacctatgttgtttagaaattttaaactcaatgtttagtaaacaaaatgtttagtaaaataaaacagaaactaggaggtgcaacatggatataggtgaaaagataaaaagattaagaacagaaaaacaactgacccaggaagagctagctaatagatgtgaattgtcaaagggatttatttctcaattagaaaataacttaacatcaccatccatagctacccttatagatatacttgaaatactaggtacaaatttaagggaattttttaatgaaatagatgatgaaagaatcagttttacaaaagaagatatgtttgaaactgaagatgaagatttaaaatataaattaaagtggttaattccaaattcacaaaaaaatgaaatggagccaataataataacattgtatccaggaggacagtataaagaagaaaagccacatgaaggtgaagaatttggatatgtattagcaggttcaatatatgtccatataggcgaaaagaaaaataaagtaaaaaaaggagagagtttttactttagaccaaaagcaaatcactatatatcaaacgaaggcaaaactacagcaaaagtgatttgggtaagtacgccaccatcattttagaatagaggtgtttaataattggtagaaaatataatagaattaagggatatatctaaacattatgaggaacttactgttttagataatttcaatttagatataaagaaaaatgagtttttaacattacttggaccaagtggatgtggaaaaactacaacattaaaaataatagcaggatttgagtatgctgatgatggtaaagttttatttgaaggtaaggagataaataacttgccaccatatgaaagacaagtaaacacagtatttcaaaaatatgctttatttccacacatggatgtttatgaaaatgtagcttttggattaaaaattaaaaagactccaaaagatgtaatagatgctaaagtaaaagaggttttgaaacttgttgcactagaaggttttgaaagacgacaagttgaatcattgagtggaggacaacaacagagaattgcaatagcaagagctctagtcaatgaaccaaaggtattattactagatgaaccacttggagcacttgatttaaagttaagacaagagatgcaaatagaattaaagagaatccaaaaaaaattaggaataacatttgtttttgtaactcatgaccaagaagaggctcttactatgtcagatactattgttgtaatgtataagggcaaaattcaacaaatgggaacaccacaagatatatacaatgaacctaaaaattcatttgtagctaaatttataggtgaaagtaacatatttgatggaattatgatagaagattataaagttaatttctgtaatagagattttgagtgtgttgataaaggattcgaaaaaaatgaaaatatagaagtagtaataagaccagaagatataaaaatggtaaagccagaagaaggaatgttaaaggggaaagttacatctacagtgtttaaaggagtgcattacgagatagaattgaatgaaaatggaagattgtggatacttcataataccaaaaatgctgaggttgggactgaactaggcatggatatatatccagaagatatccatataatgagaaaagagaataactaagatgaaaagaaaatcttttttagcatatccatatgtagtttggagtgcgatatttgtaataattcctttaatattagtggtattttttagttttacaaaagaatcaggtggaggttatgcctttacacttgagaattataaagaagtaattgaccctatatatatgaaagtttttgggcgttctattcttttagcaggaggagctacattaatatgccttatagttggttatccagtggcatatataatttcaaaggctcgtgtaagtagaagaggttcattaatattattgtttattcttcctatgtggatgaactttcttttaagaacatatgcatgggttgctatattaggaaaaaatggacttttaaatacatttttaggttggtttggaatacaaccattagcaattttgtatactaattttgctatacttttaggtatggtgtataactttttaccatttatggttcttccaatatatacagcactatcaaagatggataatgatttgataaacgctgctcatgacttgggtgcaaataatatgacagtttttagaaaaattatatttcctttgagtttgccaggtgtaatgtctggaataactatggtatttatgccagcagtcactacttttgcaatatcaagactgttaggtggaggtaaaataatgctggttggagatttgattgaacaacagtttacagttgttggagattggaactttggttcagctatatcgatatttatgatgatagtaatattaatatctatgtctataatgtcaaaatttggagatgaatctgacaaagaaggcggtgggttactattttaaaattaaagaaaataacttctaatatatatttagcattagtattcttatttttgtatgcacccatatttgctttggtactattttctttcaatgattcaaaatcaatggcaagatggaatggatttacatggaagtggtatggtcaattacttcaaaatgagagtataatgagtgctttatattatactattgtaatagctatattagcgtctgtaatatctacaatagtaggaactataagtgctataggaatacataagatgagaggtaagagtaagaaattaatactaaatgtaaactatcttcctattttaaatacagagatagttacagcagtagctcttatgagcctgtttgtatttgtaaaaatggaatttggatttacaacaatgctattggcacatataatgttttgtttgccatacgttatactttcagttttgccaaaaatgaagcaattacctgataatatagaagatgcagctatggacttgggagcaacacctatatacgctcttagaaaagtaattttaccacaaataaaaccaggtatagtttctggatttttaattgcatttactatgtcaatagatgactttataataagtttctttaatgctggaaatggtgtaagcaatctttctatagaaatctatggaatggctagaagaggtataaaacctgaaataaatgcattatcaacaataatgtttgcagtggttctaggtttacttttactagctaataaaaaagaatctatagtaagggggattaaataatgattaagtttaaaaaaacaatatcccttatagctgtaggtatgatgacagttactttatttacaggatgtaataaagcaactgattctacaaaagttttaaatgtatataatgttggagattatatagatgagtctcttatagataagtttgaaaaagaaacaggaatagatgttcaatattcaacttatgatactaatgaaatgatgtatcaaaaagtaaagagtggtagtacacactatgatttagtatttccttcagactatatggtagagaaaatgaaaaatgaaggtcttttggaaaaattagattttaagaatatacctaatatgaaatatttagataagagttttttaaatcctgtatacgacaaaactaatgaatatagtgttgcatatatgtggggaactcttggaatattgtacaataagaaagaagttaaagaccctatggatagctggaatatactttggaatccaaagtataagggaaatataatgatgtttgactctgttagagatactatagggataactcttaaaaaattaggatatagcatgaatagtgtaaatccaaaagaaataaatgaagctaaaaatcttttaatgaaacaaaaggatttagtattggcttatgtaaatgatgaaggtaaggatagattgcttggtggagaagtggcaatgggtatgctgtattctggagatgcagttacgctaatggagcaaaatcctgaccttgattatgctatacctaaagagggaactaataaatgggtagatgctatgtgtgtacctacaacagcacaaaataagaaagaagctgagctgtttataaactttttattagacccagagaatgcaaaagtaaatgctgagtacattgggtattcaacacctaatacaggagcactaaaattattagacccagaaataactcagaatcctgttgcatatccatctaaagaagtacttgataaatgtgaaacttttgaagatattggtgaaaatataaaattatatgacaaggcttggatagagttaaaatcaaaatagggtcttgttggtttaagtaaatttacttaataaatacttaataaaactgttcttttttagaaaatttattttctaattattgaacagttttattttttgtttaggtcatgtttttattttgagtttatttttatgagaatttaaagtacagtaagtttcattgattactatttttataataataactataaagaggttgtctcgaaattgagataagcctctttttcattgttgaaatgatgaaaacatgtttgatttcataaaaaaagagtgattcatgagctaaagaatttgctttgagacagtattttttattaagttatattcatatgcaatttaaatagtttattaataaatgaaaacttatttgtataatgattttaataataattagaaaaaatgggcaacttaatagaataattggaggtgtaaatttataaaaaatgaataggataaataaaaaaatagatttattaatattggctttgctcgtttttatatttttaattgttggaatagtaatactatcgattaggacagaaaataaattgaatgtgttcataatgttagcaataattttttttataataatgttaacttatttatcaaattcagtagtggggttgataacaagttcaataattatatttatgtatacatcctatattttatataacaatattactcacaatatggatgttgaatttatatcatatatgtggataatagcaacaccagtatcttcaattataatgggtaatctgaacaaaagcataaatgaattgcaaaatacaaataaaaaactatctgaacagtataaggaattagtgactattgatagtgaaactggacttagaaatttaaagattttttataatgatgtaaatatggagataagtaaatctattagacataatactgatttttctcttatgatagtaaaattaccatactacggaaacctacagactatatttggtgaaaacaaaactaataaaatagtaaaatatattggttcaaatattatagaatgtacaagaaatgaagatataatttatagtttacaaaaagatatgatagggatactaatgccaaatacatctttggaaggttcgaaagttgttaaagacagaataaagaaaaggataaaagaattaaatttagatttaaacaataggggaaaatatgtaaatatagatgtcaaaattgcatttttacaatataagagtagttttggagatagtataaattttaagaatatagttgaagaggaacttcaatatgatgtttaaaatatttaataaaagtttattaaaattagtaattgtattatcaatagtactgacaatatcaaattttagcttattttcatatgcatcagaaattacttccagcacagataaggtattaatcatatatgattctaagaaagaaacagcttataatagagatattttaaatattatgagaactctattgggaagatttagttcagatatagagctattaaaattgagtaactatgatggtgagataaatgaaaattattacagtcatatatttattttaggaatcaatgaaaactcatataataatgataaaaacactaaaaacttgattagttccttaaattcatataaagtaactatatgttggttaggatatggtatagaaaatcttttggaacataaaaaatacaatttagactatgtaggaaaaacaaacaatatagttagtgtaaattatagaggtaaatcatataacttggatgaacattatgtttttaacattgtagaatcaaaagatacaagtaataaagtaataggaagtattaatgataccttaaataagtatccatatataataaatgataaaaatcttttttatgtatcaaaattagatttagatggagttttattttatatattttgcgattcacttaatgatatttttaatattaagacgtttgataaaggacgtatatttgtaagaatagaagatgtacatgcttttagagaaccaaaaaatcttgtagagatagcggattatttaagtagtaagaatataccatttacgattgcattaataccagcatatgtaaatcctaaaaatcataaagtaataactttatcagaaagccctgaaattgtcaaagcaataaaatatatgcaagataaaggtggaactgtgatattgcatggatatactcatcaatacaagaaagaagaagtttctggagaagggtatgaattttgggatggtaaaaaagatgaacccttaaaagaaaatatgaagatatttgtcaaagatagagttttgaatggtcttagagtatgtatagagaatggaatttatcctcttgcatttgaagcgccacattatgcaatggaatcagagggatataaagaattaaaaaaatatttttctacttatatggggcaacatcaaaataatgataaaaaatttagcacaaatacatatccttatattattagggatacagaggagtttaatatatttatacccgaaaatttaggatatatagacccagaagacaagtttacttttcaaaatataaaagaaaatttagataaattatctattgtaagaggttttagtggagggttcttctttcattcatatttaaacatagagtatctaaaaaacacaatagaatatttagaaaaacagaatatagaatttatgaatttaagagattttaataattgggtaaaagttgatgaaatacaaataagaaataatggagatgaaattatagtcaactatgataaggacttagatgaaataactaaaagtgatactagatttaaatacatatccaatattagtaaaattttaatattcatagtatctataagtgttttaatatttgtgattatatttatatattttaagagaatagataaaaagaaatttttaaaataaatgattttatattagaatcaatattttaaaatattttaggagaaatttatgagagatttaaatgtatcagagtatttgttcgtatttagtctgtttagtatatggtctttattgcttataaatattattttagctatgggtggatatatattttattttaaaaactttgataaagaaataaaagaaattgatgaatatcctatgatatcaatacttgttcctgctcataatgaagctaaagtgataggtagaactgtggagtctttgttattactcaattatcctaagagtaagatggaacttattgttataaatgacaattcttctgataatagtaaagaaattttagaaaatataaaggataggtacaacaattataatttcactataataaatacagatagtttaacaggtggaaaaggaaagtctaatgcattaaatattggatataaggtttcaaaaggagattttatagctgtttatgatgcagataacacaccagataaaaatgcacttagatatctagtacaaactatagtaatgaatgatgaattaggtgctgttattgggaaatttaggactcgaaataaaaataaaaacctattaaccaaatttataaacatagaaacattaagctttcaatggatgtcacaagctggtagatggcaactttttaatctatgtacaataccaggaactaactttatattgaggagaagtatcatagaagaaattgaaggatgggatagtaaagcaattgcagaagatacagaaataagttttaggatatataaattgggatacaagataaagcttgtaccacaatctataacatgggaacaagagccagaaactgttaaggtgtggataaagcaacgtactagatgggcaaaagggaatatatatgtattaatgaaatatataaaaaatatatttaaacagggaagaaataagattgtgtttgatatagcttactttttttctgtatattttctatttttaacaactgtaattatatccgatattttatgtgttttaagtatatctaaactagtagaaatttctattccaattaacttttttctaatatggatactatcttatcttttatttattatagaagtgagtataagccttactatagaaaaaggtgaagcaacaattgaaaatatattcatagttgcaataatgtattttacatactctcaactatggctgtttgtagctataaaagggatgatagagtatctaaaagatataatttttaaaagagaggttaaatggtataaaacagaaagattttgattcatgtacaggaggaattaacatgaaaaaatttattatatcaattatatctttagtattgtttttttcaaatatatcacttatatacaaagtaaatgctgatgagactaaagttaaaaattataagtttgaaagagatataactattgatggtgttataggaagtaatagtactttttttgaagtaaataaaaattgggatattgaagaagttttattgcatcttaattttagtaagagccaaatattaaatggagatgtttcaagtttaactgtattgataaataatgtaccaataaaatctattaaattaaatgctaagacaaattataaaaatacattagaagtattagttccaaaagattatataattcaaggatataatgaaataaaaataaaaacatacaaaacaatatctgataaaatttgccaagatgattccaatactgggaactggatggttattcacaaagaatcatatatatcaattagatataagcagaaaaaggtggaaaactcaataaatgaatatccgtatccatatgcagaaattgaaaataatcataaattagatacaactatagtagtaccagataatatgactagaggagagactacagcagtgtttaatttggcatcatcatttggaaaaataacaaaaaatgatgatttaaagttagatgttaaattatattcagaaatgaaaaattggtcagatgataatattatatatattggtaaacctgaaaatacagcagaagaaattttggatattttaagtataaaggaacaaaccctattatcttcaaactgtataatcaagcaagtagattcaccatacaataagaataagaagatgatggtggtaattggtagtaatgaagatgatttaataaaggcatcaaatttattaatagaaaatagactttctaaccaagttttatcatcatcagtgcttgtaaacaaagagactaatataaaaattaatagggaacaaaaattaaatttaggtcatttaacattaaaagacttaggatattctgactttttgttggaaggagcatttaatcaacaagctttgtttgatgtcaaaataccaacgggtaaggtattagatgatggttcaaagattatcttaaatttaagatattctgacaatttagattttgaaaaatctttagttacagtgtctataaatgatgttattgtgggaagtaaaaaattggataggtcacattctaataatgataagttagaattaaaaatacctaaagatatagataataaaaactattatcaagttaaattgacatttaatttgagtataaaaaattcgaattgtgttactagagagagtaataatccttgggcatatgtatcaaataattcttatttggcgttatctacgaaagaaaatgaaaccttatcttttgaaaattatccgtatccatttgttagagatgatgagtttaatgatttaactgtgataatgccagattattcagggtcacaagctatgacctggatgtttagattaggtgttactttaggtacgaatataaattcacataatggaaatataaatgtaattagaggaaaagaatttagtgacaagtataaggatactaatattgtagtttttggagtgccacataataattctgttataaagatgttaaataataatttaaatataaagttcgataaaaattactccaattttatatcaaatgataagataagctttattgatgattatggaaaaaatatttctaccattcaattaataaaatcaccatataataatcaaaaaaatatcatggtaattagttcaatgaatgaaaaaaacttatatttaggaatggattatttgttgaataaaagtaaagttaatgatttaaaaggagatacattgataattgatgaatacggagaggtagaagatttagcttataatttaaaacctaagaaagaagtaaaagattcaagctggaatatgagtataaataagacaactaaagtatttttaatgatttcttttattactataattgtagtcatgatattatcaatgctatatataaaaaaatataaaagaagataatatgataaatttattattttaaaagaggtatataatttgaggaaatatatgaataaatttaaattaaaaagaagcattttaatctcattaataatcttaatttttatatttatagtgtactttgtaagtattgagttaaaagatgggagtctagtaaataatcaatataaaggtaagattaaatcggccaatttatctgtagattatgaaataaatcaagttatgaaggatatagataaattgggattgaatacagtaaatgtacctataattataaatgtagagtccattaattctgatattatgtcaatagataataatagtaaagaaaaggcaattaagttaataaaaaaattaaataaaaaaggtatttcaacaatattagaggcatatccatgggttgaaaatggaaaattgtatgagactgactggaaccctataaataaaaaaagatttttttatacttggcaaaatgccatattaaatgaacttataattgatgtagcaaatccactggatgtaaatgttttaaatattggttctaattttgtacatttggaagaatatcaacaaaattggggtgaaataatagattttgtacaatccaaatttgatggtcttgtaacgtacagaactaattggtggtatacaaaaaaagatgattcaagtagtaagttgttttatgaacaaaaattgaacaataatttttttgataagttagattttatatctatagcagcatattttgagttaagtaataaacctgttaatacagtggatgaattaatttctgccttacactcatctactgtaaacaatagaggacaaaatataaaacaagaaatatataacctttataaagctcatagaaaacctatattttttggagaattaggtttttcaaatagagaaagtgcaagttctcagccgtggaatcatactccttcaaaagctgtaaatggcgaagaacaagcaaggtgttttgaggcatataagaaagtttttgaaaatgaagactggataaatggtttttctgtgttttgtgtaggtaaaatagatgacgaaaaaaatttttacccatcaaaagagagtataaaagttattaagtcttggtatgaataattttaaaagtgtagaatttatatagattaaatagatgattaggagagatataaatgaatgacatcaaggttatgactgtatttggaactagacctgaagctatcaaagtagcacctttaataaaggaacttgaaaaaagagagaatataaaaagtattgtttgcgttacagctcaacatagagaaatgcttgaccaagttatagaaaccttcaatataaatgtagactatgatttggatataatggaaaaaggacaaagcctgaatgatataacatgtaagattttaaataaacttcccttgattttaaacaaggaaaatccaaatataatattggtacatggagatacaaccacaactctagctacaagtttgactgcattttataataaagctcttgttggtcatatagaagctgggcttagaacctatgataaatattctccttttccagaggagttaaatagacaacttacaggtattattgctgatatgcactttgctcctactaatttggctagaaaaaacttgatttctgaaggaaaacctaataataatatatttgtaactggtaatactgctattgatgctttaaagatgacaataaaagaaaactataatcatcctataattgatgagattggtaacgataggatgattttgttaacctctcacagaagagaaaatttgggtaaacctatgaaaaatatattcagagctataaagcgaatagtagatgattttgaagatgtacagatagtatatcccatacatttaaatcctaaaatacgaactatagctgatgagatatttggaaaatttcctgaaaaaattcatattatagagcctttagatgtagctgattttcataactttttaaataaatcttatatgataatgactgatagtggaggaatacaggaagaagctccatcattaggtaagccagtccttgtgttgcgtgataaaacagaaagaacagaaggaattgaagcaaagacacttaaattagtaggtactaatgaagatagaatatataattcagtgagcgatttattaataaataaagatagctatgttcagatgagtaaagcatctaatccatatggagatggaaatgcaagcaaatatatagtggatataataattaaaaaatttaattgcaaatatttaaattagataaggtctaaaacattaactaattgatataagatttatgataatattaaggaatacaatttttaagggggagtaatatggctagaaaattaataaaaaatttaggtaaaagtaaaagtgtaaagagagtgaaacttttatttaagaagatttttattactgtattcatagtagcaagtatagttgctatttttaatataacgaaatattttgaggaattatacaaagtaagggatttaaaaagtactaaaattgaatactatatggatgtggctgatgaagcaggagatggaaaggtccaattaagttggaaggccttacttgctatagacatggtaatacatgatgaagatttaagtaatataaaaaagaaagacacattggatataggggaaaagtttatagtagaagataaaaatgataaaggcgaaaaggtgtataaggtaaaaaagtttaataaggtattaagcgaattgaaatttgactcttctcaaaaaagtagagcaagaaaatacatgaaagatttggaatacacataccttggaaataaacaattagatagtagtgatgaaaaaattaaatttataaagaagttagaagactcagctataagagaatatattgattatggaatattgccctctgtaacaattggacaagctatattagaatctggctggggaaattctaaacttacaaaacagagtaataatttatttggtataaaagcagataaagcatggaaaggaaaaagtgtagaaatttcaacttcagagcattataatgaaaaaattgtagctagttttaggtcgtataattcattacaagattctgtcaaagaccacagtttatttttaattaataataaaagatatagaaaacatgggttgtttgaggcaaaagattatattagtcaagctcaagcattagaaaatgcaggatatagtacagcagaagataaaaaaggaaatcgtatatatgcagagctattaatagatattattaggagttataatttgcaattgatagacaataaagttgagacaaaataattgttaactttatatgaggagataacaagataagattcttttctacaaaaagaatagaaaaattgtaaaaaaaactaaaaaaatgtattgacttgttatttaaaaggtgatattattattactgtactcgaaagagaacaaaatgaactttgaaaattaaacagtaggttaatttataaacaagaaacaaaccataaagccagatattttgataacaatagtatctgagcctgataaacttttatttgagagtttgatcctggctcaggatgaacgctggcggcgtgcctaacacatgcaagttgagcgatttacttcggtaaagagcggcggacgggtgagtaacgcgtgggtaacctaccctgtacacacggataacataccgaaaggtatgctaatacgggataatatatttgagaggcatctcttgaatatcaaaggtgagccagtacaggatggacccgcgtctgattagctagttggtaaggtaacggcttaccaaggcgacgatcagtagccgacctgagagggtgatcggccacattggaactgagacacggtccaaactcctacgggaggcagcagtggggaatattgcacaatgggcgaaagcctgatgcagcaacgccgcgtgagtgatgaaggccttcgggtcgtaaaactctgtcctcaaggaagataatgacggtacttgaggaggaagccccggctaactacgtgccagcagccgcggtaatacgtagggggctagcgttatccggatttactgggcgtaaagggtgcgtaggcggtctttcaagtcaggagtgaaaggctacggctcaaccgtagtaagctcttgaaactgggagacttgagtgcaggagaggagagtggaattcctagtgtagcggtgaaatgcgtagatattaggaggaacaccagttgcgaaggcggctctctggactgtaactgacgctgaggcacgaaagcgtggggagcaaacaggattagataccctggtagtccacgctgtaaacgatgagtactaggtgtcgggggttacccccttcggtgccgcagctaacgcattaagtactccgcctgggaagtacgctcgcaagagtgaaactcaaaggaattgacggggacccgcacaagtagcggagcatgtggtttaattcgaagcaacgcgaagaaccttacctaagcttgacatcccaatgacatctccttaatcggagagttcccttcggggacattggtgacaggtggtgcatggttgtcgtcagctcgtgtcgtgagatgttgggttaagtcccgcaacgagcgcaacccttgtctttagttgccatcattaagttgggcactctagagagactgccagggataacctggaggaaggtggggatgacgtcaaatcatcatgccccttatgcttagggctacacacgtgctacaatgggtagtacagagggttgccaagccgtaaggtggagctaatcccttaaagctactctcagttcggattgtaggctgaaactcgcctacatgaagctggagttactagtaatcgcagatcagaatgctgcggtgaatgcgttcccgggtcttgtacacaccgcccgtcacaccacgggagttggagacgcccgaagccgattatctaaccttttggaagaagtcgtcgaaggtggaatcaataactggggtgaagtcgtaacaaggtagccgtatcggaaggtgcggctggatcacctcctttctaaggagaattacctactgtttaattttgagggttcgtttttacgaatactcaaaattagcactttaagcaacagaataaactgaacgcatgtgaagtttgtttgttggcgctgtgcgttagcactttaagcaacgggatttatccgttggcgctgtgcgttagcactttaagcaacggaatttattcgttggcgacgtgctttagcactttgaaaactgcatatatatttagtgatatgacatctaatttgtaatatataaagctgataacttttaaaaattatcaagttgatagactttaatctatcaaacctttttaactggtcaagttattaagggtgcagggcggatgccttggcactaggagccgatgaaggacgtgataagctgcgataagcttcggggagttgcacgtaaactttgatccgaagatttccgaatgaggaaactcacttagagtaatgtctaagtatcattaagtgaatacatagcttaatgaggggaactcagggaactgaaacatctaagtacctgaaggaagagaaagaaattcgattccgtaagtagcggcgagcgaacgcggattagcccaaaccaataaagttttctttattggggttgcggacatatcataacgaagaggtatcgtaattgaagaggtttggaaagacccaccacagaaggtaatagtcctgtatgttaaacgagaagacttcagatatgatccagagtaccacgggacacgtgaaaccctgtgggaagcaggagggaccaccctccaaggctaaatactacctagtgaccgatagcgtatagtaccgtgagggaaaggtgaaaagaaccccgggaggggagtgaaatagaacctgaaaccctgcacttacaagctgtggaagcacatttcttgtgtgaccgcgtactttttgtagaacgggccaacgagttacgttaagtagcaaggttaagcacttaaggtgcggagccgtagcgaaagcgagttttaactgagcgttcagttacttgacgtagacccgaaaccgggcgacctacccatgagcaggatgaagcgaaagtaaaatttcgtggaggtccgaacccacgagcgttgaaaagctcggggatgacttgtgggtagcggtgaaattccaatcgagcccggagatagctggttctccccgaaatagctttagggctagcctcaaggtgagagatacggaggtagagcactgaatgtcctagggggtattgcacctaccgaagactatcaaactccgaatgccgtcatcttatacttgggagtcagactgtgggtgataagattcatagtcgaaagggcaacagcccagatcgtcagctaaggtccctaaatgtaagttaagtggtaaaggatgtgggattgcacagacaaccaggatgttggcttagaagcagccactcattcaaagagtgcgtaatagctcactggtcgagtgatcctgcgccgaagatttccggggctaaaacttactaccgaagctacggcatcagtaatgatgggtaggggagcttcccatacgggttgaagcatgaccgtaaggacatgtggacagtatgggagtgagaatgttggcatgagtagcgagatgtgggtgagaatcccacaggccgtaaacccaaggtttccaggggaaggttcgtccgccctgggttagtcgggacctaagctgaggccgaaaggcgtaggtgatggacaacaggttgatattcctgtactaccgataaccgtttgagagaagggatgacacagtaggataagctaagcacactgttggttatgtgtgcccaagcattgaggcagtcaaagtaggcaaatccgctttgataatgctgggatgtgatggggagcgaaatttagtagcgaagtagctgatttcacactgtcaagaaaagtctctatcgaggttaaaggtacccgtaccgcaaaccgacacaggtgggtgaggagagtatcctaaggccagcgagagaactgttgttaaggaactcggcaaaatgaccccgtaacttagggataaggggtgccaccatcaggtggccgcagagaataggcccaagcgactgtttaccaaaaacataggtttctgctaagtcgcaagacgatgtataggagctgacgcctgcccggtgctggaaggttaaggggatctgttagagcaatcgaagcagtgaacttaagccccagtaaacggcggccgtaactataacggtcctaaggtagcgaaattccttgtcgggtaagttccgacccgcacgaaaggcgtaacgatttgggcactgtctcaacaacagactcggtgaaattgtaattccggtgaagatgccggatacctgcgacaggacggaaagaccccatggagctttactgtagcttgacattgggtcttggtactacatgtacaggataggtgggaggctttgaaaccaggacgccagttttggcggagccatccttgggataccacccttgtagtactgggactctaaccataggccatgaatctggtcttgggacactgtcaggtgggcagtttgactggggcggtcgcctcccaaaaggtaacggaggcgctcaaaggttctctcagtacggtcggaaatcgtacgtagagtgtaaaggcaaaagagagcttgattgcaagacatacaggtcgagcaaggatgaaaatcggacttagtgatccggtggttctgcgtggaagggccatcgctcaacggataaaagctaccctggggataacaggcttatctcccccaagagtccacatcgacggggaggtttggcacctcgatgtcggctcatcacatcctggggctgtagtaggtcccaagggttgggctgttcgcccattaaagtggtacgcgagctgggttcagaacgtcgtgagacagttcggtccctatccgtcgcaggcgtaggaaatttgagaagacctgtccttagtacgagaggaccgggatggacgtacctctggtgtaccagttgtcctgccaagggcatggctgggtagctatgtacggaatggataagcgctgaaagcatctaagcgcgaagccaacttcaagataagatttcccaccgcaagggtaagaccccagaaagactatctggttgataggtcgaaggtgtaagtgcagcaatgtatttagcttatcgatactaataggtcgaggacttgaccaatatttatttgatgttcattcattaggatatatatgtagtttttagggtgctaactctaaaaaattagttttactaatttataaaaatttaatgcgggtgtagctcaatggtagagttctggccttccaagccagctgtgagggttcgatccccttcacccgctccaaaagattatgtggttacaatagcagagaggatacacctgttcccattccgaacacagaagttaagctctctagtgctgatggtacttggtgggaaactgcctgggagagtaggacgtagccacgtaatctttttttgttgtattaaatttaataaacctacaattgttatatgtttttatttgtcttttatagatttttttggcaataaatgatatagtgaagataattaaatatattcaatatatttaatttttttattttttgtttttataatttttttagaagtttattttttatgtaattatttataattttgggtaaaaacactttgatataatttcaaaaattaaaaggttaaaaaacaaagtagaaatttatgttaaataaggagattaatatgagaagaaatacaaaattattaacaacagggattctttcaatggcaatcgtcgcacctacaatggcatttgctactgaatctaatgctatggaaaataacgctgatttaaatataaacttagagaaaaaaagtatcgttttaggtagcaaatcaaaagtcagtgtcaagtttaaagaaaaaccagatgcagatagcattacattaaagtataaatgctatgatatgccattggatacaactctaaattataatcaatcaactgagtcatatgaaggaactatcaattataataaagacccagaatatttaaatgtttgggaactacaagggataacaataaacagcaaaaataatcctaaaactttaaacaaacaagaactagaaaagatgggattaaatttaaaagactataatgtaacgcaggaatgtataattgaagatataacttctagaaaagatgtaaataaatatttaagaaaaacttctgcacctattacagaacttacaggaagtgatagatacgaaacagcagttaaaataagtaaagaaggctggaaaaatggttcagataaggtagttataataaatggggatgtaagtatagatggcattatatcaactccactagcaactacatataatgctccaatacttttggttgaaaaaaataatgtacctaatagtgtaaaatcagaattaaagcgtttaaatcctagagatgtaattataattggagatgagaatgctatttctaaaactactgctaatcaaattaaatcgactgtaaatgctagtcaaacacgtctaaagggctctaatagatatgagacatctttattgatagcaaaggaaatagataaaaatcatgatgtggaaaaagtatacataacaaatgctaatggcggagaagtggatgcacttactatagcagcaaaagcaggtcaagacaagcaaccaattatattaactgataaaaatagtattacagacaacacatataaatggttaaagagtgaggatttacaaaatgcttattttataggtggacctcaaatgatatcaacaaatgttataaataaggtaaatgatataactaaagataatgttactaataatagagtatatggagcagatagacacgaaacaaatgcaaacgtaataaaaaaattctatacagatgatgagttagaggctgttttagtagctaaatcagatgtacttgttgatgctttagcagcaggtccattggctgcgaacttaaaatctccaatacttataacaccaaagacgtatgtatctgcataccataaagataatttagaagctaaatcagctaataaagtatataaaataggaggaggattgacttctaaggtaatgaactctatagcatcatcattatctaaacacaatacaactccaacagaaccaggaaatagtgggggtaagacagttatgattgacccaggacatggtggttcggacactggaacaacaggtaaaccattagggggtattaaagaaaaagactatacattaaatacttcacttgcgacaactgaatatttacgttcaaagggattcaatgtaataatgacaagagacacagataagactttatctcttggaaatagaactgctttatctaactctttgagaccagatttatttacgagtatacactataatgcatctgatacaactgggaatggtgtagaagtattttataagcttaaagataaagatggagggactactaaaactgtagctacaaatatattaaatagaatcttagagaaatttaatctaaaaaatagaggtgcaaaaacaagaacactatcaactgaccctacaaaagattatttatatgttttaagaaataatgatatgccagctgtacttgtagaatgtgcatttttggataatgagaaagatatgagtttacttaatacatcaaataaagtaaaagaaatgggtacacaaataggtaaaggcatagaagattcattaaaatagtctacaatgagagcatagaaaaatttaaaataaattaatctgcaattttaaatttaaactaaagctataagataagaatgtaattataatagtaataaagactgtatatacattgtgcatataagtgcgaaatgaggtatatacagtctttttatgattaattgtaaaaggatttatattatatgaagaatttacatatcttaaggctacagttaattgtcaagagttggagtattcatttgtaatacacaataaaagcttaattactatattttattgtgtgtttgtgtgtttgtgtgttttttgtggatttttatgtcaataaatgatatagtatagataattaaatgtattaaatatatttaatttttttattttttgagttttataagtttatttttatatattacttatatattatttatattttgggttagatacactttgacatattttcaaaagttaaaagattaaaaataaagtagaaatttatgttaagtaaggagattaatatgagaagaaatacaaaattattaacaacagggattctttcaatggcaatcgtcgcacctacaatggcatttgctactgaatctaatgctatggaaaataacgctgatttaaatataaacttagagaaaaaaagtatcgttttaggtagcaaatcaaaagttagtgtcaaatttaaagaaaaaccagatgcagatagcattacattaaagtataaatgctatgacatgccattggatacaactctaaattacaatcaatcaactggggcatatgaaggaactatcaattataaccaagacccagaatatctaaatgtttgggaactacaagggataacaataaacagcaaaaataatcctaaaactttaaacggacaagacctagaaaagatgggattaaatttaaaagactataatgtaacacaggaatgtataattgaagacataacttctagaaaagatgtaaataaatatttgagaaaaacttctgcacctattacagaacttacaggaagtgatagatatgaaacagcagttaaaataagtaaagagggctggaaaaatggttcagataaagtagttataataaatggagatgtaagtatagatggcattatatcaactccgctggcaaccacatataatgctccaatacttttggttgaaaaaaacaatgtgcctaatagtgtaaaatcagaattaaagcgcctaaaccctaaagatataattataattggagatgagaatgctatttctaaaactactgctaatcaaattaaatcgactgtaaatgctagtcaaacacgtttaaatggttctaatagatatgagacatctttattgatagcaaaggaaatagataaaaatcatgatgtggaaaaagtatacataacaaatgctaatggcggagaagtggatgcacttactatagcagcaaaagcaggtcaagacaagcaaccaattatattaactgataaagatagtattacagacaatacatataaatggttaaagagtgaggatttacaaaatgcttattttataggtggtcctcaaatgatatcaacaaatgttataaataaggtaaatggaataactaaggatagtgttactaataatagagtatacggagcagatagacacgaaacaaatgcaaatgtaataaaaaaattctatacagaggatgagatagaggctgttttagtagctaaatcagatgtacttgttgatgctttagcagcaggtccattggctgcgaacttaaaatctccaatacttataacaccaaagacgtatgtatctgcataccataaagataatttagaagctaaatcagctaataaagtatacaaaataggtggaggattgacttctaaggtaatgagctctatagcatcatcattatctaaacacaatacgactccaacagaaccaggaaatagtgggggcaagacagttatgattgacccagggcatggtggttcagcacctggaaattcatctggaggaatgattgaaaaagattacaatttaaatacttcacttgcaacaactgaatatttacgttcaaagggattcaatgtaataatgacaagagacacagataagactttatctcttggaaatagaactgctctatctaattcattgaaaccagatttatttacaagtatacattataatggctcaactaataaacaaggtcatggtgtagaagtattttataagcttaaagataaaaatggggggactactaaaactgtagctaccaatatattaaatagaattttagagaaatttaaacttacaaatagaggtataaaaacaagagtacttcctagtgattctacaaaagattatttatacgttttaagaagtaatgatatgccagctgtacttgtagaatgtgcatttttggataatgaaaatgatatgagtttaataaactcatctgcaaaagtaaaagaaatgggtacacaaataggtaaaggaatagaagattcattaaaataaatggaaataaaaatatttaaaaacttaatgtaaatttatactaaagtcaaaaaatgaaatataagtgtatcaatagtaagactgtatgtacatttgcacatgtgaatgcaagtatatatacagtctttttttgtagttaaatgcaataatttgattgtgttttgtaaaatacacaatatgatataattagataatatacacttaatttaattgaggaaggtgattatatggaatatttatttgaaaaaagtagtttaaaagaatatggaaatgaagctttagataaatatagagaattattagataaaactgataataattcaaggtgtattcttttattagtaccaaacaataacacaaagatacgatatgaaagggctctaagattaaattatagtgaagaactgaaaataacaacatatataagttttgtgaagaaagaattagttaaatactggccactaataatagaaaaatgtgatgaaataaatacaaaggttgtatctccaacatttatatcaaatagtttaagtgaatatttaatagtgcaaaaagttaaggaaaaaaggatacaagaaggatattttgaagatattacaggaaccaataaatccatagcaaatagtataatgactaacataaataaatctgcatttaatttaattgattttgattttattggagaaaaaatatattcatcaaagaaaaataaagatagtatatatagattttcatacactcagatggatgaaattatatcatattatataaattcgttactatcaaattcaattttagataatgcattaagcatatatttatacaatcaatacctacttaatgatgatttttatttaaaaaacttatttacagaagtgagatatataattgtggatagtcttgaaagctcaagtaatgcagaagttgattttataacagaagcattggataatacattacaaagttatatatattttgattatagtagggattattctgtatttaataatgtggatatagactatataaatgagaaaataatatcaaaaattaagcctaaagaagaaaatattaaaaagaaggagattagaatagaagatttatacttattacctgcaaatatagaattaaatcaatcaagtcaattatacaatgaaatgttagatttaataagtgaaaaagttatatctcttatagaagaaaatgtatctccaagagatatagcaattatatctcctataaacaatagtatattggagcatcaaattagagattctttgatagaaaaaaatatagatgtttttagtactaagaaggataaaaaagctgtagattatccatatgggaatgcattggtagtggctacatgtatattttatggatatttagattttataaaagatgatgaatacttaagctttttagaaactcttttagaaataaataggataaaagcatttaagatttttaatgaaacaagacatttaagtattgataatatagatgaacatagtcagtatcgtgatattttacagtatattgaagaaaaaaagaagagtgatataaaaatacatgaatttttaactcaattttacatagataaaatgttaaatttaaaagaaggtaaaaagaatgttgggttatgtaaaaagataatagctgaaagtgagtcttttagtgaaagtttaagtctacttaggatgaaaaaagaaaagatatttatagaagctttaaaaagtacaataaacgattattactctgttgtcgatatagaagagttgaaatccaaagacaaaatagtaataactactccttattcatatatatcatcaaatatagatagaagtatacaaatatgggtagatataggaagtaatgcttggaatatgaaaatagaaaaagatataagtaatttaattgtacttagaaaatcttttgaagaaaaaaagatttatacaaatgaaatggaagaatattataaaaaatattatctatacaatacagtatataatttgttattaaatgcaaagaaaatctatgcatttaaaagtgaatatgcgattaatggttatatccaagagagtatattatatagtatacttttaaaaatctcacataaaggagataaaaattatgattaatataaattatagagaagaccagataccaataataaattacgataatggtactatggcagtaccagcagtaccaggtgctggaaaaacatttataataacaaatttagtagctaaactattacttgaacagaaacataagggtggtaaaatattaattcttacatatatgaatagtgctgtaaataattttaaaggtagaataagaaagattcttgaagagaataaaatagatgatactaattcgtatgaagtaatgactatacacagtttggctgtaaaaataataaaggaaaagccagaagttgtaatgttaagtgaggattttaacatagctgacgatttgcaaaaaagtattatattaaatgaatgtataagtagatttagatttgaaggtggagaaagagcttttagatggtttttaaaggagcaaaaagatgaacgctggaaagaaatagctcttgaagcctgggaaagaggtttttttgaatttgcaggaaatgcaataagtgaacttaagtataagggaatttctccagataaacttgaagaaatattgtcaagaggacacaaaggaatgcttaaaattattttaccaatatataaattgtatgatagaaaattaaagcaaaatggattgctagattatgatgatatattaattttagcagaaaaaactttaagcttagacgaagggcttagaaagaagtttcaaactagatacaaatatatatttgaagatgagtgtcaggactcaaatgaaattcaaggtaatataataaaaattatatctagtgaaaataaaaacctagttagagttggagatataaatcagagtataacaggaacattttcatcatcagaccctaaattttttaaagaatttataaatagtgcagatttctgttataggatggatatgtcaaatcgaagttcaaaagatatacttgatttagcaaacactcttgtcaagtatgttacaaaggaatttagacaagaagaatgtagacatgctcttgaagatatgcaaataaaaactgtgccaaatggaatgggatataaagaaaatcctaatccagaacattataatataaatgtaaagtggtatgagagttggaaaattgaaatagagcaaactgctagatacgttaagggtataaaaaataaatatccagataaaagtataggtatattggttccatttaatgaacaagtgacacaagttgctaaagaacttagagagaataatctaacctttgaagaattaggaccaaattctttgaataaaaggaaggttataaacaacatagcatatattattgattttatgttacattgtgatgatgtagaaaagttaatagttgtacttaataaagtttttatagatactgataatgaagaagaaataaagtattttttagaagaattaaaaaactattctaccgaagaaattatttataattttgaatttagtaagttagataatgatttaatagaatttaaagaagaaagtgacatatatttaagttttaaaagaggaatagatattataaaacagatattagaatatccaataataaggttagacctcttagttttgtttattgggaaaaaacttaatttagaaaaagaagataaagctgtactggattatatatctttttatataaagtatctaatatcagaaaatataaatatggatttagaagatgtatataatttattgtttgatgtaaagaatagggtgtttaatcatataatagatgtggtatatgagataaatggatatgaaccagagcccggtagtataacactatgtaactatcataagtcaaaggggatggaatgggattgtgtgtttttactaggtcttgttgaatataatttccctgacaatattaatcaaaagtttcagagtgataaatggtatctaaaagaaaaatataaaaaccctatggcaattattaaatcagaagttgaagctatattaaaaggaagtatttcaacagattatgctcataaaacgaagattgattctataaatgaaaagattagacttttatatgtagggattactagagcaaaggaaatgttagtactttcaggaagtgcttatagagatgaaagtgatatagggaataagagaaaagagcaaaaaccatgtatatatttaagcagacttaatcaacatattattgaaaaaaggtcaaattaatatataataagttattaaaagattgcttgaaatatatctaaaaggggataaaacaatatgtacagtaagtaactactaaaaaataaagttaagagagaagtgatatgagtgaacgataaattaaaatatttttcttatagtcaaaattcaatcaacacatataaatcatgtccattgaaatttaaatataaatatattgatagaataaattggaaaaatgatgatgttggtagtagagagtattatgaaactttaaaaacaggaagagattttcatttgatttgtgaaagatattttagcaatatacctcttggaatctattttaatgaggatgataaaaatagtaaaaagtttttaaagtggatggaaaatataaaaaaagttgttcctattgaaaaaggaaaaacgtatttgccagaatatgaagtaaggatgaccttaaatggggatataatacaggcaaagtatgatttagttgtaattggaaataacaatatagaaatatgggattggaaaaccgagtctaaaaagattgactataaacacgtagaaaatagaatacaaactattgtttatatgtttttagcaaaagaagtaatacctaaagttttaaaaatggacataaatgttaaagatataaatatgagatattatcaacctgaatttgatgacttaccaattaccattttatatgatgaagaaaaacatgaagcaaatagaaataaaattcaaaattatataagtatgataaaaaacactaattatgaagaacatacatacgaagacaatctatacaatgatatagaaaaggtatataataaagaagaacgtatgtgctatagaaataaaaagcattgcaagtattgtgaatttaataagttatgtaatggcaaagaaatagattatagtattttggaggcggaaatttatgggacttaggtttgtattaggtagaagtggaagtggaaaatccacctatatactagatgagattaaaaaagaagctcaaaaaaatgaaacgacatcaattatacttttagttccagaacagtacacatttgaggctgaaaatagagtaagtaagctattcttaggaaaagaaaaagataagtatctaagagttagggtacttagctttaagacactaagtaatatagttttttctcaagtaggaggattgacagatgtaaatataaattctagtggaaaagcaatgatggtatatagagctattgaagatgtaagtgaagaattaaatgtgttttcaaaatcaaaatcgcagtctggttttgtaagctcaattacagatatgatatcagaaatgaaacaatacaatataagccctgaaatgttagaaaatatatctggagaattggataatgaaactttaagtttaaaattaaaagatataagtaaaatatataattcttttgaagggaaattgcatgaaaattatgtagatgctcaagatatgttaacttcattggcaagtaaaattgaattaagcagttatttagatggagcttgtgtttatatagatgaatttacaggttttacaccaaatcagtacaatgtcataaagagtatattaaataagtctaaaagtgttaatatctctttgactgtagatgatatcaactatattgggtacagtaaatctgatatgttttctagaacgaaatttacttattcaaaattgactcaattgtgcaacgaagaaggcataaaaatattgccacaagtaaatttaaacacaggtgttataaaaagatttgaaaaagttaaggaattacagcacctagaaagattttataatgcttatccatataaaatatattcaaatccaactgaaaatataaagataaaagagtttaacaatttatattcagaggtggaagagatagccagagaaattgtacatttagttagagataagaatgtaagatatagagatataaccattgctacaagagatttaaatagatatgattttttagtacactctatatttaatgaatataatataccaaactttatagataagaagagagaggcaaaaagtaatccaatagttattttaattatttcagctttagaaatgaagaatagacgatatgggtatgaaactatgtttaggtatttaaaaagtggacttataggaattgataatgatgatataaatttactagaaaattatgtgttggctaatgggattaaaggtaaaaaatggtttgatgaaaaatgggattatagaataacacaaagtctttcaggtcaagaaagtgaatttgaactggaattaaaagaaaaaataaatgaaataaaaaatagagtattagagcctatagtaattttacaagaaaaattaagaggaaaaaatagagtaaaagaaatctgtagatatatatatgaatttttattagatataaatatgccagaaactatagaaaatttaatagtaaattttaaggataaaggggaacttgatgttgcaaatcaatactcacaagtttgggacatagtagtggacatattagaccaaatggtggaacttatgggtgatgaaataatttctttagaaaaatttataaaattaataaccttaggctttgatgaatatgaattaggactggttcctcctagtatagaccaggtacttgtaagtagtgtggatagaatgaaaaatccagacacgaaatatttatacctagttggaactactgatggtgtgtttccactgattacaaaggatagtggaatattgagtgataatgatagggaaagtcttggaaacaaaggaatcgaagttgatattgatagtaagactaggagttttgaagaacagtttcttgtatataaagctcttacttcgacatctaagaatttaaccataacatatccaatatcagaccatgaaggtaaaacgcttagaccatcaataattatatcaagacttaagaagatatttccaaatatagaaaataaaagttatttagtggaagaaaataaaagcactgataaagatatacttaaaaaaataacggttaaatcccctacatttaatgaacttataaacgtaataaaaaattatgacagtgatgattacaatacagaagagattaatagtatttggttagatatatataggtactatttaaaagatgaaatctatagttctataacaaaaaaagttataaaaggtcttagttatactaatcaagttcataagattgaagagaaaaaaataaggtcattgtataaaagtaattctcttagcatatctaggcttgaaaaatatgctgaatgtccatttgcttattttatacaatatggtctaaaagcaaaaaagcgtaaagagtattcatttacaccaccagatttaggaacttttattcataatattttagataggttttcaaaagaacttttacaagataatttaacttggagagatattgatgaaaaatatatagaattaaagataggtataatagttgatgaaataattttaaagataccaggatatatattaaatagttctgagaggtataaataccttgcatatagattaaagaatatgttgacaactgctataactataattagtcagcaaataaaacaaggttcatttgaaccaatagattatgaagttaaatttggcgacaatggaaaatatccacctataaaaatggtgttagaaaatggacaagaagtaagtttaattggacaaatagatagagttgatgaatttgaagaaggagaaaataaatatataagaataatagattataagtcaggcaataagtccataagtctaacagaaatatattatggtctacaattacaattacttgtgtatttagatgcaatccttgaaagtgcaaaggatgaagatataaatataaatccagctgcaatactatattgtagaataaataatccaatagcaaaatttaatgaagataaagatgatgaagaaatacaagaagcaatattaaaagaacttagaatgaaggggcttgtagtaaaagactctcacatagttaaagagatggataaatcattaatagatggagaaaggaaaaactctttagtaataccagtaggtcttactaaggatggaaatgtaggtaaaagtacttcagcaataagctatgaggatttcaaactgcttagaaaatatgtaaggcatgctataaaggatttatgtgaagaaatgttaagtggagaaatacgtatagctccatataaacataaagatggaacatcatgtgacttttgtgattactctactatatgtcagtttgattcaactataaaagataacaagtataaaaatttaaataataagagtaatgaagagataataaaaatgatgaaaggagatgttaattagtgagttctcctaaatggacaaaagagcaattagaagttataggaagtagagaatgcaatttattggttgctgctgctgctggttcaggaaaaacagccgttctagttgagcgtataattcaaatgataacaagtagagaaaatccaattgatatagataagttattagttgttacatttactaatgctgctgcgtcagaaatgagagagaggataggggatgctataggaaaagccttagatgaaaacccagaaaataaacatttacaaaaccaacttgttttattaaataaatctagtattacaacaatacactcattctgtttggatgttataaaatcaaactttcatagaataaacttagaccctaatttcagaataggagaccaaactgaatgtgctattttgaaacaagaagcaatagaggaagtatttgaagatttatatgaagaaagagatgaggggtttttaaatttagttgaaagttatgcagaaagaggaggagataaagaagtacaagatattatcttgggaatatattcatttgcaatggcttctcctgaacctaaaaaatggttgattgactcagcagaacgatttaatattgatgaaaattttgatttttcacagtctatttgggctagagctatattagacactgtaaaaatagaaattaatggtctttgtctaaatatggaaagggcattaaaagaagtggaatcaatagaagaattagaaacttttgcagaaaagttatccgttgaatataaaaaaattgctaacatttcacaagcatgtaataaatcttgggatgaggcatataaaaagatggcaagtatgtcctttgaaaattatgtaaaaggagtaaaaagaatttcaaaagatgctccttcgtatataaaagaatcaaaagaaaaggcaaaaactataagagataagactaagaagtctttagaaagtatagtaagtgctacattcaataaagataatgattctattagagaagaaataaaatatctttataacatagttaaaccaatatctagtgttgtactgagatttgaagaggaatatagcaataagaaaagagaaaaaggaataatagattttaacgatatagagcattttgcattaaatatacttacagatatagatgaaaaaggtaatattgtaccttctgatatagccgttggatatagaaacaagttttatgaaatatttatagatgaatatcaggatagtaatctagtgcaggaagtactgcttaaagctgttgcaaatacagaaactccaaatagatttatggttggtgatgtaaaacagagtatatatagatttagacaagcaaagccagaattatttttgcaaaaatataataactataatgataaaaagggaagttcccatagaaaaataatgctttacaaaaattttagaagtagagaagaagttgtagatgctgtaaattatatatttgaaaatataatgaatgagaatataggagaaattgaatatacagaaaaagaaagactaaatttaggtgcgaattttaatgtggatacagacgagaaatctattattggtggagcaacggagatacacctaatacaaaaagataataaacttgatgatgatattataaatgataaagacgatagaattaataacaaagaaaatgaaatagaggaagaagaaaaattagataatatacaacttgaggctagaatggttggaaacattatcaaagatttaatgaaagtcaatgaagatggaaaaattcaaaaggtctatgataagggaatagatggatatagacctgtggaatttagagatatagttattcttttaagagctacatctgcatgggctccagtgtttgcagatgaattgatgaatatggatataccaacatatgctgatgttggagtggggtattttgatacgattgaaataaaaacaatattgtcattacttcaaataatagataatccaatgcaagatatacctcttatatctgtattaaaatcacctatatttggatttacaccagaggatttgattgatattagagttcagagtaaagataaaattttttatgaggttttaaaaagtacagcagagtatgatggatttacagattctcaaaatgaaactgagtctgagtttataccaagtgaagagtgcataaacaaaagtaaagattttttaattaagctaaaggaatttaaagaaaagtcaatgtacatgagtacagatgaatttatatggtacttgtacacaaggactggatactatgcttatgttggagcattgccaggtggaagtcaaagacaagctaatttaaaagtattgtttgagagagcaaaacaatttgaagaaaccagtcttaaaggaatattcaactttgtaaattttatagagaaattaaaaaaatctagttctgatatgggaagtgcaaaaacacttggtgagaatgcaaatgttgttagaataatgagtattcataaaagtaaaggtctagaatttccagtagtcatatgctctgcaatgggtaaaaatttcaatactcaagattttaaaaagagtattttatatcatcataatttagggtatggacctcaatttgtagactatgagagaaggatttcttttccaagtatagccaaagaagcattaaaaagcaaaataaatatagaaaatttatcagaagagatgagagttttatatgttgcatttacaagagctaaagaaaaattgattataactggttctactagaaatatacaagatagtataaagagatggtcaaatggaattgaaagtttagatacaatatcacaatacgagatattaaaaggtaaaaattttttagattggataatgccttgtgtattaagacatagggatttatctaatctactagaagaagtaggattagacgcagtttttaatgttgaacataattcaaaatggtatggaaagttgtggaataagaatgatattttagtggaaaagaagagtgatgaagaaaaagaaagtattgaagaaattcttgaaaaaatagatgtagatagtccggacagtgattattacagtgaaatagaaaaaaaattaaactatatatatccatatgaatttagtacaagaaaacctgctactatatctgttacagaaataaaaaagatacaaaataattatgaagaagagttaataaatactatatttgaacaaaaagtaatattaaaaaagcctctatttattcaaaatgaagaagaaagagaaaaaataagtggaacagaaagaggtacaatagtccatttggttatggaggttttagacttaaaaaatgtaagtagtgtaaatgatataaaatcacaaataagaggttttgtttcaaaaggtataataacagaaaaacaagctagtatagtaaatccatataaaatatataaattttttgcctctaacataggaaaaagaatgttgaatgctgaaattataaatagagaaaaatcaatttatgcacaagtaaatatgaaagacatatatatttatgaaaagcttataaacaatgatgataaaaaactttatgataatgaaagtgtcatgttaagaggtatagttgatgcttattttgaagaagataatcaaatagttttggtggattataaaacagattttgtaaatgaggaaaatataaatcaaataatagagaaatataaaaaacagttggatttatatgcagatattattgaaactttaactggtaagtcagtaaaagagaaatgtatatatttatttggagttgatgaagctgtttgttattagtttttatatataaattaaacctaaaagatagaggaaggggaaaaaatgagatttattcatacatcagattggcatctagggaagtccctagaaggccattctagaattgaggaacaagcaaagttttgtgaggaatttataaaaatagtagaatcaaatgaaatagatatggttataattgctggagatgtatatgatacttctaatcccccagcacaagcagaaaaactattttatcagactgtatcaagacttgccaataatggtcagaggtgtgtattaataatttcaggaaatcatgataatccagagagactttctgcaataacacctctagcacatgaacaggggatacttatatatggttatccattaagtgctacgatagaagctaagtataaagggtttgaaataacatatgcaactcagggatgtacaaaactgaatataaatggagaaaatattgtgattgctacattaccttatccaagtgaaaaaagattaaatgaagttttttcaagtgaagatgagtttgagaaacaaaaaaattattctgaaaaggtaggagatatatttagaagtttagaagaaaattttagaagtgatactataaatatagccgtatcacatatatttgtaataggtggagagagtactgaatcagaaagacctatacaattaggtggaagttttttagttgaaagaaaagatttgccagaaaaggctcaatatactgcactaggtcatttacataaacaacaaaaagcttccgaacgtttaaatgcatactattctggttctccacttcaatatagcaaggatgaaagagcgtataccaaaggggcatacatagtggatataaaagctggagaaaaaccaataattgaagatgtatattttaataattacaaacctatagaagtatttaaatgtaatggaatagaagaagcactagatatatgtgagcaaaatcaagatagagagatttggtcatattttgaaataaatactgatgagataatatcacagaatgaaattaaaaaaatgaaggaactattaaaagacataatagaaataaaaccaataataacatcttgttatgaacaagaaagtgtagatataaaagaaaagtctatggcagagttgtttagagagttctattcttttagtaaaggtgtagagccaaaaggagaacttatggatttatttctagatataataagtgaagaaggtgaatcagcagatgagaccaattagattagaacttacaggacttaatagctatattgataaacaagttatagactttgaaaaattaattgaaagaggtttgtttgggatatttggaactactggaagtggaaaatctacaatcttagatgcaataactattgctatgtatggaaatatatccagaaatacaaaagaatatataaacagtgtgtgcgataaggcaattatatcatacgagtttgagataggaagcaaaaacactagaagaagatacattgtagatagaaccattgctagaagcaaaacaggaacaaagacctctaatgctagattaatagaagtattgaatgacaatatccaaaatgttttagctgataaagttgtggaagtaaatgaaaaagtagcacaggttgtaggattaacggcaaatgattttactaggtcagtagttttaccacaagacaaatttaatgagtttctaagattatcacgtgcagatagaagagacatgttagagagaatttttaatcttgagaaatatggaagaagtcttggagaaaaagtgaaaaagagaaaaaatatacagttacaaaatttaaaagatttgaaatcaaaattaagtcaatatgatggaattacagaggaagtatacaacaatataaaccaagaattaatagagttaaaaaatttggaaaaagataagaataatgctttagacctagctcaaaaatcttatgaagaaagtaaaacagtatatgaagaacaattaaagttagaaaaaaatgaacttagaaaaaatgagcttgatttaaaaaatagtgagataaaagaaaagattgctcttgtagaaaatgatagtaacgctaaaaaggtagacccatacataagttcagttcaaaatctagaaaaaaagatagatgaagatagctttgtagtaagtaatttagaaaagaaattagcaatattaaatcaggagcttgaagttacaaaaaatagatatgaaaaaataaacaaaattaagaatgaagaagtccctaaattgagtgaagaaaaaataagattgcaacaagcaataaaattagaagaagagttagttttattagatagagagttaaaagatctaaaagaaagtggaattaatttaaataagactaaagttgaattagaaaaagtaaagcaggtgtcagagtccagaaaagatgcagttactaaatctataaaagaagttgaaggaaagattgataaagtaaatataagtgcagaattaaaacaaaaaatatttctagcatatgaatacgagaaagattacaacaacgtattggaagaaaaaaatcaaaagctaaataaactagaagaaatactcaaagagacagaaaatataaatttaaaagttagatatattgataaagataagaatgatgtaaatcgtaatttagaaaatttatcacttcacttggatgttcttcttaaaaaatgtcctggtaagagtgctgatttacttttaaaatctgaatatgttactgaattaagaagtaaagcaaataatactaaagaaaatgaaattaagaaaagcagtatacaagatgaattaaagataatacttgaaagtaagtttaatactgaaagggaagtaaatttactaaatgaaaaacttgaaaataatagaaagaatagagatgacctagaaaaagaattagaagaactaaagtatttaaatttagcctctgaacttagacgtgaattaaaagaaaatatgccttgtccagtttgtgggtcaaaacatcatgaaaatcataatataactaagtatgatgaaaatatatcttttgtcaaagaaaaactggagaaattagaaaaagaaaaaataagtataagaaacaatatagaggaattaaatgctaaagtaagtgggtatttatctatagaaaaaatgaagactaaagaacttgaagatgtaaaaggaaaactaggggggattccatctagtcaattattaaaaaaacttgatgaagaacaaagaaaacttgcattgttaaaatctaatattcaggagtgggagaaagaaaaagagagtactgaaaataaagtaacattagctaaagaagaaaaaaataaaattgaaaaagaagaattaaaaataagagagagtctgaataattataagaaattaacaagagatttaaacatagaaatagaaggtttagaaaataaatgtaaaaaacttaaacaggaatacctaggattaaagacgattactaaagtctctaatctattgtcaaaagtaaaagaaataagggagaatgaaaaagaattagaattactaagtactgggcattcaaatttattaaaaaatagagactcactagatattaaaataagagaaaatgagagtaaactacatgaaatagagatagaattaataaaggctagagaattatatgtagaaaagaaattgagtagagataataagtataaagaagttattaacataacgaaaggtgatttagctaaaaatcttttacataatgttgaagaaaatatatgtaagatattagaacaagaagaatcaagtaagaaaaaattggaagagcaaagattagaatatgaaaaaaacattgctgaaaagcacaatatagatggtagacttaaaactgctaaggaacaatataaagaccaaaaatcaacactaaataaactattagcagaaaataaatttgaaagtatatatgcagtaaaaagagctttattagatactgatgcagtaaaaaaattgattgaagaaatactagagcatgaagaagaacaaaagttattatcatttaagataaaatcatcaaaagaaaaattaaatggaagaagcataaagaaggagtactttgaacagttaaaagatgaaatttataatttgaaagtagaaataggaaatatatccaaagatattggagctaatcaaaatcagttaataacactaaaagactctttagataagataaatgattttaataaacaacttaaggtagttgaacacaatgtggacttattggaagaattagataaatgtgtgcaaggaaataaatttgtagaatatgtttctacaaaccaattaaaatatatagcattggaagcatcaaaacgattggatggaataacaaaaggaagatatgcacttgaaattgactcaacactaaactttgtaatgagagataactttaatggaggagaaagaagaagcattgatactctatctggtggagagacattcttgacatctctatcattagcacttgctctttcatctcaaatacaattaaagggaagtgcaccattagaatttttctttttagatgaaggttttggttcattagatagtgaacttttagaaattgttatagaatccttggaaagattgcatagtaataatctaagtgtgggtataataagtcatgtcgaggaacttaaaaatagagttcctgttaagctattagtttcatctagtgaggctggaataggttcaaaagtaaaaattgaatatagttagaaaatatatggtaattgaatatattatctaatatttccaaataatatgtaattgtgatataataaaaactaatattaaagttatttataattaatattaatataaaaacatgtaagtaggagtgtggtaagtgttggaatcgcccaataatttgattcagattatttttttaatagtattacttatagggtctgcatttttctcagcatctgaaacggccttaatgtcgttgagtaaaatcagaatcagatatatgcaagatgaaggagttaaaggagctaagttagtaagttcattaatagaaaatccaaataagcttttaagttctatattggttggaaataacgtcgtaaatatagcagcaacatccatatcaacatctttgtttataggattaatgggagaaaaaggagtggcacttgctacagctgttatgacagtattagtattaatatttggtgagattactccaaaaacaatagcagcaaataattcagaaaaggtttctctattagtatctaaacctataaaagcaattatatttatattaagaccaatagtatggatatttaatataattacaaatattatatttaaattatttggtataacaaataaaggagctaaatcattcataactgaagaagagctaaaaactatggtaaatgtaagtcatgaagaaggcgtccttgaaatggaagagagagaaatcataaataatgtttttgaatttggagatatgcaagctaaaaatgcaatggtacaaagaatagatatggtagctatagatatggaagatagttatgatgagataatacaggtatttaaaactgaaaaattaagtagaatgcctgtgtatgaagaaactatagatgatattgtaggaatacttaatataaaagatattatatttttatctgatgaagaaatagagtcatttgatattaaaaattatatgagagaaccttttttcacgtatgagttcaaaaagataacacaacttcttgaagagatgaaacttgaaaaaagtcagatggctatagttgtagatgagtatggtggaacatctggacttttaactatagaagatttagtagaagtcattgttggagatatagaggatgaatatgatgaagaagaggatgaaatacaagttataaaagaagatgagtatattgtagatggaagtactaaaattggtgatgttaatgaacttattggtgtaaacttggaatctgaggagtttgattccataggaggttttataattggacacctaagcagattgccagaagaaaatgaagtaattgaagttgataatataagattttgtatagaaagtatagaaaaaaatagaattaaaaaaataagaatatatacataatgtaataatgttcttaaatttattagaagtgtataaatataaaagatatcttttatatttatacacttctttttattttgtattcaaataaaactagtatgaaatggacaaaataaaaatataaattagaagaaaggagatttttaagatgagcatactagaaaataattttttatacaaattaaaaaacaacactatctttttttgtatatatacattgttatttatttttatttacaaagcgtttccatacatagctccattttttctaggtgctataatagcacttatgattaatcctatagcacaaaagttagaaaataagtttcgtataaataaaggtatctctactcttgttctaagttttcttgcagtggctatagtcagtacagttactacaataatagtaataaattcaatgaaagaattaatgggatttttaaataatatatctgctaatcctgaggatataagtaatactattatgtattttttaaataaaataaatgactttatgaaatcatttcaagaaatagccaattttgatgtagaacaattagtaaacaaattcagtggtgaagtaatgcaaattacaaaaaatcttcttactagtatacttggattggctacttctattccatatattataatatttataattaccttgtttattgctacctactttatagcaaaagaccttgataagattgaaaatagtttttataatatgtttactgttgatgttagaaagaaggtaaaaaacgtaaagaaagaggcagggctttcacttgttggatatataagggcctatacaatacttatggctataacattttttgcaatctggggaagttttgctttatttggattgaaatacggtctaatagtagggtttgtagggctttaatggatttaattccattcctaggtataataacaatatatcttccagtaattgtttattattttcttataaaaaattattttatagctataagtatgactgtgatattttttgttttgtctttgattagagaaatacttgaacctaaactagtatcagtaaatgttggactaaatccattagctaccctagcagcgatttttattggaatccaagtaaaaggaataattggagtaattttttgtttgggtttggtatgtatgcatgatatacttaagaaggtggatattttttaattataataattgatagatttttttaaaaataaaattttattcacaggtaaataaaaaaatattaatcttattaagaaagagggtatatacgtgaaacaaaaagtagtggaaagatttttaaaatatgtatcatttgatacaacatctaattctcagtgtgagaactgtccatcttcagaaggtcaaagagttttagctaagtatatagttgaagagctaaaaacaatgggtgttgatgatgtgagtttagatgaaaatagttatataatggctactttaaaaggaaatactgatggtgtggatactataggattcatatcacatttagatacaattgaagatgttagtggaaaagatattaaaccaagaataatagaaaattatgacggaaaagacatagttttaaatgaagcgttaaatgttattacgtatgtaaaggattctccagagttggaagaatttaaaggtgacgatttaatagtcactgatggaacaactctacttggctctgatgataaagctggtatagctgagatagtgactgcaatagagtatctaataaatcatccagaaattaagcatggagatataaaaataggatttacaccagatgaagaaattggtagaggtgctgatttatttgatgttgaaaaatttggagcaaaatatgcatatactttagatggaggaatagttggagaacttgaatgtgaaaattttaatgctgcaaatgcaactattactatacatggtagaaatgttcatccaggttcagctaaaaataaaatggtaaatgctatacatatagctgctgaaatatcagaaatgttcccagcagatgaaagaccagaaacaacagaaggatatgaaggattttggcatttaaattctataggtggaaatgtcgagaatgtaagtatggcttatattattagagaccattgtagagaaaaatttgaaaatagaaaatctattatgatagagaatatagaaaaaataaataagaaatacgataatagagtggaattggatttaaaagattcttattacaatatgaaagaaaagattgagccagttatgtttatagttgatatagctaaagaagctatggaggaattaggtataaaaccacgtttagttcctgtaagaggtggtactgatggagcaagattatcttttaatggattaccttgtccaaatatatttactggtggattaaacttccatgggaaaaatgagtgtataccagttagttctatggagaaagctactaaactaattgtaagaatagctgaaaaatatgctgaaagagtttagttaaaaagtatttaaaaattaagcatttaaagttataatagctatatcattctttataagtcaagctgattataagcttgtgttgtatttaaaatggtatagctatttttgtaattatttttataaaagataattatttttagtttagggtatcaataaaaagtatggatatcaataggtattaacatttaaaagggggaattgtattgaaaattaaatctaaaaaaataatagcatttgcactttcacttgggattatgttgccaagttgtgtatatgcagacactattagtaaaaatcaaaatgcacaggtagatatgaacaattatcttcaaggtagaaaatctccaaaggaggaaaaacttattggtgaagatagatttgatacagcgataaaaatatctcaaagtggttggaataatggttcagaaagggtgtttctagttaactcaaattcattgccagatgcattggcttcaactcctttggcaagtaaattggatgcaccaatactgcttacaaataaaaatagtataccatataatgtaacagaggaaataaaaaggcttaatccagcagaagttattttaattggaagtgaaggagctatttcatcaagtgtaaaagaatctcttgaagatatggaagtattagtcagtagaatcggtggagcagatagagaagaaacatctttacttcttactagacagctagatgatactggtgatttaggtgtctcaaaagtggcagtggttaatgggtataatggactggcagatgcaacttcaatatcaagcccagctgcaagtgataatacagctataatatatacaggtaaggatagcataagaagtgaggcaaagaattttattacacaaaactcaactaagacatacatagtaggtggggagtacagtataagtaaaaaacttgaaggacagttagtaaactcagaaagactagcaggaacagatagaaaagatactaatgcgaaagttttagaaaagttttatggaaaatcaagtaaggttaataatatgtattttgcaaaagatggaagtggtagagaagctgatttagttgatgggcttgctgctggagtattagcatcaaaaacaaagtcacctgtagtacttgcaagtggaagtttaagtagtgcacagaaaagttttataaaaaaagtaaaggctgataaatttgtacaagttggtggaggtaaaaatagtaaaccatatgcagaagcattagccttacagtaatattgtgtaaatcaaaattaatatataataatagcaagtaaaccaagttgaacttcaatatatataataaaataagtaaactaagttatatttcagtataatatataatgaaataagtaaactaagctatgtttaaatataatatataataaaataagtaaactaagttatatttcagtataatatataatgaaataagtaaactaagttatactccaatataatatataatagaaacaagtaaactaagttatatttcaatatagcatataataaaacaagtaaaccagattctatttaattagaagtttaaggtattgtacttaaacttctaattgagatagaaataaaatggtttacttgtttttattatgagtttaataaattaaagcttattttatttttattaaaaatttactaatcattgatatttattatatttccagtattgatgtcaattaagtttatatcaagttcaagctcatcctcatcatcagtttttatgatatctataattgcgacagaatggcttccatcttttgggatagaagtacttcctggatttattactattaaattatcatccatgtatagtttttttacatgagtatgtcctaaaactaatatgtcaccacccattttctttgctttgtcaataatttcttcttctgattctatataaccatgattcaatataattctaatttcaccaaattggctcatgacataaggactctgaataggatgttctataaccatctggtcaacatctgcatcacagttcccttttacaatcacaatgttttctaatttatttaatgtctcaataaattttttaggattatatccttctggaatatcatttctaggtccatgatataagacatctccaccatgtaataaaacatcacaatcagataatacatttaacgctttttcaaagtaaagtaagctaccatgagtatcactcattattcctattttcatattaaaaatcctcctaagtacagtctataaaaatttttcagatactctatgccaaaactcatagtttgacattctaagtaattttatttttgcatcagatatactaacttttatattttcgatttgtctaaatctgtgctcaactccatcaacgacaatcaatacagaatcttcaaatctatattctggtgcaatctttataacagattcatttgaacatattatacttgatgtaaagcacctatatgcattggtatttatcggatgtaaaggtgtaatctgcataagttcaagatttatatcaacaatactacctccagcagaatagttataggctgttgaacctgtggaagtagaaataatcataccatctccactaaaattttgtatatgtttattatcaaggcttaaatttaggtgtatagtcctagacttgtctcctcttataacaacctcatttacagcaagcatattagaaccactagtagttgtatatacttccgcattaagaagtgacatttcttgaataatataatctttttttgtataagcttcaataaagctatcaatcttatctggtaaaatatcaggaaaaaaccccagatgacctgtatttattcccattatgggaatctcaggaaaatcgaaatctctaactgttcttaaaaaagagccatcaccaccaattgatataataagctctgtgtctggataaatatctgaatacacttcaaagccagcattgataagttttctagttaagagttctttagtctcaagggacttatttaattggtttgtatttatagttataattcttttcatatattcacctcttcatactttgtattataacatagttttataattcttaatttataaatttataaatgacctttgtagtgaatgtgttaaaatatgtataggtgggtataaaaaaatgcataagaggtgaagatgtgtttagcataaggaatatcacaaaaaaattaggaaaattcaagttaaataatataaacttagagttaaaggaaggggatattgttgggattataggaccaaatggttcgggaaaaacgactttaataaaaattataatggggattattgatgcagatgaaggtgaaattgaactttgtaatgaaactattgaaaattctccaataagctttaaaaacaatattggttttgtatatgattctttacaattttatccacatttaaaggttaaggaatttagaaaaatagtttctttattttataagaattttgatagagaaaaatttgatgaataccttaataagtttgacatagaagaaaatatgcatattgaaaatttatctaaaggtcaatctgagaagcttatgttatcaagcgcacttagtcataatgctaagttattgattttggatgaaccaactgctggtatagacccgattgtaagaactgaaataatgcagtacttacaagattttgtgaaaaatggaagtagtagtgtaataatttctactcataatactgataatttaattaaaattgctgattatcttgtttttataaatagaggaaatcagatttttactgttaagaaagaattaatagaacaagaatataagataattagggcaaataaagcagagttagaagcaattaaagaaagtatagttggtgttaaagagtataaatattataatgaggcacttgttaaagttggagatagcttgaaagtaaaaagcctattgatagaaattgataagcataaggtcaaaaatcctactatagaagaactaatgtattattatgtaaatgaggtgagaggatgttcaatttaataagaaaagatttaataataggaattagttcagatggtatccgtaatttaaagtacatattgctattttttgtgttttattttttccttaattcaatttcatattatacagtaagtattgttgttagttatttgatatttataaatacatttgagtgtgattatgaaaatgattcaaggatttttataaggagtatgccagttagtatagaagatatagtttactcaaaatatttattaggtgtaggactaataatttctgtaacaataattgtgtccttactaagtaaattgacatcactagtgttctttagaaatatggttttaaatgatgtatttttttctgtaaatatatttttagcaattttgacgattttactgcctttaatttttaagtttggatatggaaaaatgaaagtttgtggttttatagtaagtattttaatttactttgtatatggaagtcttttgaagatgattagtatgattgtatatcaagtaaagcattttaattatagtaaagttggaggagtatatctttcaaattatgtaactgatatagctaatactaagtatataaatttatatagtatgacatttttaacaataataatttttataatatcaatgtatttttctattaagatttcaaaaaagaataagtttaattattaaaattttaattaatattatagcacaatagcacaaaatataaggagactaaaaatgaagaagtttataaaagtttcattttttattttggggatttttacactattcatagctataaataaattagtatatagagatatggtaagtgtcaaagattatgaaataaatcatttagaggaaattgtttttgattttgatagcaggagaagtagagatatcggtactattgtaagatttaaaataagcaataatagtaaatatagttataaattaaacagtgctaaaatgaagtttgaaaattgtgtggaaaataaaaagggaatgaataagtgttctgcatatgtaaatgtagatttatttaatgaaaaaaattctataactgaaagtactctgaaatatggaataaaaccaaataatcaaggttatgttgattttgtaattccaaaaggactaaattttgattataggtactttaatgaatctggtatgagtgtagaatataaaggagaatatattgtcaatattccaatggcaaaaggactttatctagtagttggaaaaaataatgatacatggaatgctaatattatggaataatttgaaaaataaatcaattatagatataattaagaataatatgaaatttataaaaattcagactaggaggggtatttaatgtcaataagtaatgtaagagagtattttaaacaatttggcaaggaagacagtatattagaatttgaacaatctagtgctactgtggaacttgcagctgaagcagctggggttattccagcaagaatagctaagacactctcatttaaaataggagatgatgcaattttaattgtgacagctggtgatgctaagattgataataagaagtataaggctgaatttaattgtaaggctaaaatgttgacaccagaagaagtcttggagtttactggacatgctattggtggagtctgtccatttggtttaaaaaattctataaaagtctatttagatgattcaatgaagagatttgatacagtatttcctgcatgtggcagtagtaactctgcaatagaacttacatgtgaagaaatggagaagttttctaagagtgaaaaatgggtagatgtttgtaagaattggtaaaaaaatatagtaaactatagtaggaattagtaaaaaactacctctgtatacaatctatacagaggtagttttttgtgtaaatatttataaatctaagaggaaaatctaatttaaactaataatccaaaataaagttaaaaaattctgattttttttcgaaacaataaaaaaatgacaaaaaagtggaaaaaatgtaataaatattgttaaaaaaataattagaaattattgaaaaattatcctttgagtgttactattatagatgtaagatatttaaaaataaaaaatagtcagataaaaatacgattatttagctctattaaaataatttttatacgataaaaatcttctgtacatggctaaaaaacagatgtacagacaatatttaatgtttaatataccctaatataaatatcgtaaacaaattattttatctgtgaccagtgtgaaagaaatcttattctaacttgaaatttcacaaaattccaaaaagcgagattttttttaagtatagttgattttaaattaacaatttatgattaaattaatgtcataattggttagtataatcacatataaatatagagcgtagtttgattaaggttataaatttctcgacgtatattcaaataccttattatagatgttgccgagattttaattaataaatgaaaataaaatatttataaaatactgaggaggctattatggatttaaattctaaaaaatatcagatgcttaaagagctatatgtaagcttcgctgaaaatgaagttaaacctttagcaacagaacttgatgaagaagaaagatttccttatgaaacagtggaaaaaatggcaaaagcaggaatgatgggtataccatatccaaaagaatatggtggagaaggtggagacactgtaggatatataatggcagttgaagaattgtctagagtttgtggtactacaggagttatattatcagctcatacatctcttggctcatggcctatatatcaatatggtaatgaagaacaaaaacaaaaattcttaaaaccactagcaagtggagataaattaggagcatttggtcttactgagcctaatgctggtacagatgcgtctggccaacaaacaactgctgttttagacggggatgaatacatacttaatggctcaaaaatatttataacaaatgcaatagctggtgacatatatgtagtaatggcaatgactgataaatctaaggggaacaaaggaatatcagcatttatagttgaaaaaggaactcctgggtttagctttggagttaaagaaaagaaaatgggtataagaggttcagctactagtgaattaatatttgaggattgcagaatacctaaagaaaatttacttggaaaagaaggtcaaggatttaagatagcaatgtctactcttgatggtggtagaattggtatagcagcacaagctttaggtttagcacaaggtgctcttgatgaaactgttaaatatgtaaaagaaagagtacaatttggtagaccattatcaaaattccaaaatacccaattccaattagctgatatggaagttaaagtacaagcggctagacaccttgtatatcaagcagctataaataaagacttaggaaaaccttatggagtagaagcagcaatggcaaaattatttgcagctgaaacagctatggaagttactacgaaagctgtacaacttcatggaggatatggatacactcgtgactatccagtagaaagaatgatgagagatgctaagataactgaaatatatgaaggaactagtgaagttcaaagaatggttatttcaggaaaattattaaaatagataaatattaaaatatacacaataggtcgatattaaaatagatatggaggaaggatttatgaatatagtcgtttgtataaaacaagttccagatacaacagaagttaaactagatcctaatacaggtactttaattagagatggagtaccaagtataataaaccctgatgataaagcaggtttagaagaagctataaaattaaaagaagaaatgggtgctcatgtaactgttataacaatgggacctcctcaagcagatatggctttaaaagaagctttagcaatgggtgcagatagaggtatattattaacagatagagcatttgcaggtgctgatacttgggcaacttcatcagcattagcaggagcattaaaaaatatagattttgatattataatagctggaagacaggcgatagatggagatactgcacaagttggacctcaaatagctgaacatttaaatcttccatcaataacatatgctgaagaaataaaaactgaaggtgaatatgtattagtaaaaagacaatttgaagattgttgccatgacttaaaagttaaaatgccatgccttataacaactcttaaagatatgaacacaccaagatacatgaaagttggaagaatatatgatgctttcgaaaatgatgtagtagaaacatggactgtaaaagatatagaagttgacccttctaatttaggtcttaaaggttctccaactagtgtatttaaatcatttacaaaatcagttaaaccagctggtacaatatacaatgaagatgcgaaaacatcagctggaattatcatagataaattaaaagagaagtatatcatataatttaaggggggataaagaatgggtaacgttttagtagtaatagaacaaagagaaaatgtaattcaaactgtttctttagaattactaggaaaggctacagaaatagcaaaagattatgatacaaaagtttctgcattacttttaggtagtaaggtagaaggtttaatagatacattagcacactatggtgcagatgaggtaatagtagtagatgatgaagctttagcagtgtatacaactgaaccatatacaaaagcagcttatgaagcaataaaagcagctgaccctatagttgtattatttggtgcaacttcaataggtagagatttagcgcctagagtttctgctagaatacatacaggtcttactgctgactgtacaggtcttgcagtagctgaagatacaaaattattattaatgacaagacctgcctttggtggaaatataatggcaacaatagtttgtaaagatttcagacctcaaatgtctacagttagaccaggggttatgaagaaaaatgaacctgatgaaactaaagaagctgtaattaaccgtttcaaggtagaatttaatgatgctgataaattagttcaagttgtacaagtaataaaagaagctaaaaaacaagttaaaatagaagatgctaagatattagtttctgctggacgtggaatgggtggaaaagaaaacttagacatactttatgaattagctgaaattataggtggagaagtttctggttctcgtgccactatagatgcaggttggttagataaagcaagacaagttggtcaaactggtaaaactgtaagaccagacctttatatagcatgtggtatatctggagcaatacaacatatagctggtatggaagatgctgagtttatagttgctataaataaaaatccagaagctccaatatttaaatatgctgatgttggtatagttggagatgttcataaagtgcttccagaacttatcagtcagttaagtgttgcaaaagaaaaaggtgaagttttagctaactaatttcttggggagggtattatgagtacaagtgatgttaaagtttatgagaatgtagctgttgaagtagatggaaatatatgtacagtgaaaatgaatagacctaaagcccttaatgcaataaattcaaagactttagaagaactttatgaagtatttgtagatattaataatgatgaaactattgatgttgtaatattgacaggggaaggaaaggcatttgtagctggagcagatattgcatacatgaaagatttagatgctgtagctgctaaagattttagtatcttaggagcaaaagcttttggagaaatagaaaatagtaaaaaagtagtgatagctgctgtaaacggatttgctttaggtggaggatgtgaacttgcaatggcatgtgatataagaattgcatctgctaaagctaaatttggtcagccagaagtaactcttggaataactccaggatatggaggaactcaaagacttacaagattggttggaatggcaaaagcaaaagaattaatctttacaggtcaagttataaaagctgatgaagctgaaaaaatagggctagtaaatagagtcgttgagccagacattttaatagaagaagttgagaaattagctaagataatagctaaaaatgctcagcttgcagttagatactctaaagaagcaatacaacttggtgctcaaactgatataaatactggaatagatatagaatctaatttatttggtctttgtttttcaactaaagaccaaaaagaaggaatgtcagctttcgttgaaaagagagaagctaactttataaaagggtaaaaatctaattaaaaatatatttgctgttaactagattaaatagtattttaatctagttaacagaatataaatactaaaataacaggaggttataactatgaaattagctgtaataggtagtggaactatgggaagtggtattgtacaaacttttgcaagttgtggacatgatgtatgtttaaagagtagaactcaaggtgctatagataaatgtttagctttattagataaaaatttaactaagttagttactaagggaaaaatggatgaagctacaaaagcagaaatattaagtcatgttagttcaactactaattatgaagatttaaaagatatggatttaataatagaagcatctgtagaagacatgaatataaagaaagatgttttcaagttactagatgaattatgtaaagaagatactatcttggcaacaaatacttcatcattatctataacagaaatagcttcttctactaagagaccagataaagttataggaatgcatttctttaatccagttcctatgatgaaattagttgaagttataagtggtcagttaacatcaaaagttacttttgatacagtatttgaattatctaagagtatcaataaagtaccagtagatgtatctgaatctcctggatttgtagtaaatagaatacttatacctatgataaatgaagctgttggtatatatgcagatggtgttgcaagtaaagaagaaatagatgaagctatgaaattaggagcaaaccatccaatgggaccactagcattaggtgatttaatcggattagatgttgttttagctataatgaacgttttatatactgaatttggagatactaaatatagacctcatccacttttagctaaaatggttagagctaatcaattaggaagaaaaactaagataggattctatgattataataaataagaatttgggaattaaaagtttaaataaaattgtttaaaaaacaatttcggatatatgaaaaatctaatttaatgggggtaatgaatatgagagaagtagtaattgccagtgcagctagaacagcagtaggaagttttggaggagcatttaaatcagtttcagcggtagagttaggggtaacagcagctaaagaagctataaaaagagctaacataactccagatatgatagatgaatctcttttagggggagtacttacagcaggtcttggacaaaatatagcaagacaaatagcattaggagcaggaataccagtagaaaaaccagctatgactataaatatagtttgtggttctggattaagatctgtttcaatggcatctcaacttatagcattaggtgatgctgatataatgttagttggtggagctgaaaatatgagtatgtctccttatttagtaccaagtgcgagatatggtgcaagaatgggtgatgctgcttttgttgattcaatgataaaagatggattatcagacatatttaataactatcacatgggtattactgctgaaaacatagcagagcaatggaatataactagagaagaacaagatgaattagctcttgcaagtcaaaataaagctgaaaaagctcaagctgaaggaaaatttgatgaagaaatagttcctgttgttataaaaggaagaaaaggtgacactgtagtagataaagatgaatatattaagcctggcactacaatggaaaaacttgctaagttaagacctgcatttaaaaaagatggaacagttactgctggtaatgcatcaggaataaatgatggtgctgctatgctagtagtaatggctaaagaaaaagctgaagaactaggaatagagcctcttgcaactatagtttcttatggaacagctggtgttgaccctaaaataatgggatatggaccagttccagcaactaaaaaagctttagaagctgctaatatgactattgaagatatagatttagttgaagctaatgaggcatttgctgcccaatctgtagctgtaataagagacttaaatatagatatgaataaagttaatgttaatggtggagcaatagctataggacatccaataggatgctcaggagcaagaatacttactacacttttatatgaaatgaagagaagagatgctaaaactggtcttgctacactttgtataggtggtggaatgggaactactttaatagttaagagatagttttagattataatatttacaaattaaatatttaattatgaatttaacctgtatgaataactatttgttattcttacaggtttttatagttaaaaataattattatctattaaacaaaaatagtgtaaaatatataatatcatgattttgaagatataaaaagcaggaagatataaaagaaagtaggtaaaagtttgtttaaaaaagagaatcaaagatataatcttatatcgtatacaaatgaagaagaaatgactttaaaagaagttttattggacaagctaaatttctcagttaggtcattatcaaaaatgaagaaggaaaagagtgttttagtaaatggagtatataaaaaaccaagtttaaaggtgtatagtggtgatttaatagaagtaaaaatagacgaggaaaaagcaaattttgaacctcaagatttaaatttacagataatttatgatgattttgatataattatggtgaataaacctccatttatggtagttcacccaacaaaaagccactatgataaaacaatagcaaatggtattagttactatatagataatcaaaaagaaaacgtaaaaataagatttgtaaataggttagatatgaatacttcagggttagttatagtagcaaaaaatgcttatgcacatcatactttatctacagcaatgagtgaaaataaagttgaaaaaaagtatataacagtagttgatggaattataaaagaaaatgagggaactatagatgagccaatttatagacctacagaagattcaataaagaggataatagatgaaagaggacagtcatctgttactcactataaagtaatagaaagactagaaaatgcaactgtattagaagtaagcttagaaactggtagaacacatcaaataagagtacatatggctcatataggtcatggaataataggtgatgagttgtatggttatgtagatgaagagctaataaataggcaagcacttcatgcatacaagctagagtttgaacaaccaagaacaaaagaaaaattgaaatttaaagcagatataccagaggatatgaaagagttaatatcgaaattaagataatggggtgatatatatgataatacataaatttataatacatgttttggacaaaaatagtgatgttccaatattaaatgactttgaaggcaaagttaatcaagaagtagatggttttttccagaaagctataaaaagaattgcaaaagatgaggatttaagaaaaggtgtttttaaagattataatgacaatttaattaaaaactgttgtgaacaaataatatatgatgaaagtacttttttgaaaaattctaaagaaattgcatcttacttgtttgacgttatgaaaattaatgctgcactagaatcttgtgatttggcaatttgcttatacactattaaagatgaaaagagtgtagcaatactgaaattagattataaaaagttgtacactcattcaattgaatttgtggatgataaatttaatattcaaatggtttcaaatgaaattggtatcccagagactttaagacaaaagcaaggagctttgattagtttaagtggtataaatgatgagtttcatctaaggcttttagataaggatgctgaaaaagaagggtcagaatctaagtttgtaacagaatttttaaatgctaaaaaaatagatgatgataagtacaagaccaaggtatttaaaaatacagctgaaaattggataactaatgctcttagtaatgatataaagcaagctgaagatgtaagaagtatattaaattatacactgaaggaaaaacatgaagttgatataaatgactttgttgataattcaattaaagatgatgagttaaaggatagctttaaagagcatatggaagaaaaaggtcttgatgaaagttttagtatagataaaaaatgggttgagaaaaagcttaaaaaaagaagtataaaaacggataatggttttgacataaaagggaatctaactgattttgaagacccaatgaagtatactgtaaagcaaaatcaagatggaactatagatataataataaagaatgttacattttatgaagaaaagtaatttatatacttagtatataaattaaatataagagcgtgtattttatatattgtaaataaatgtaatctagtctgtgcgaactctaatataatttattatgtagaagtttacacagactatttatatttgtagacaaaacgatactatttgttttcttcgatatatttacatatatcaccaatacatttaaagttctcagcttcctcgtctggtatttctattccaaattcatcttcaagggccattataatttcaacagcatctaatgaatcagcttctaagtcgtccattaaagatgcttccatagttatctcatctaaattgtctacccctaattgttctgctattatttcttttattttctcaaacattttaagcctcctaaagcagttttaattaattttaatgttagtttaatataatatcaagaatttttcaatatggaatctataaaaaataataaaattttataaatgtagtaataaagtattatttgatgaataaactttattgataacaaatataacttaggaggaaatgctatgaaatatgtaggactattactaacttcagtaggaatgtttttacttatagcagtaaatttttattataattcaataactttagatatgcaacgtatagaggattatgtaatggagaccaatttaatccttgaagatgtagctgaaaaggagagttatgtatctaatgaaaaagaagactacatatcaaggttaatgcatgtaaagaaaggaatagaaaattcaaaaacatccttcttgatagaaagatataaggagtacaaaataaaatcaatagaaagtttaatctacactatatcagaggagaaaaaagattatctggatgaagttgatagatacaataaacttggtgaaaaagaaataaataaactaatcaataaaaactttttagaagtaacttatctgtctattactacatatatttaattaaagagacaaaacttagtctcttaatgattcaaggaggattagttatgacaaaattagaagacaatatggaacgtttctttggaggatgcgaaggattttttggtaataaaatgttgataataatagttatagtattcttactattatgcacagacattttagaagacttattatgcgatgacaatatatggatatgggttatattaatagtattgttattatttaacttcgatgatggttgttgttgctaaaaaatattgattattaaataggtaaaaccagtaacttatacaagttatggttttaccttttttagttcaaattaaaaaatttaaaaaaatagtaaaaatacattagcaaaatggaaaccaaatgcatagtatatgttaggagcgaaaagctcaacaaaatatcaacaggaggtaacgtacaatgttagatagattctttggagaagaaggatgttttggtggaggaggatggtggataatagtactattcttcctattcttagcttttggagatagctgggcagaatttgacataatggcatggataccattcctaatagttttattaatactttgctgctgtggtggatgcttagaataagaacacagttattaaaaaaaggagggctttgttatgttagatagattttttggagaagaaggatgctttggtggaggaggatggtggataatagtactattcttcctattcttagcttttgaagattgctggagagacattgacataatgtcatggatacctttcttaatattattgctaataacttgttcatgtggtggattctttgatggtgaagtaggttgcggctgctaatacttaaatcattagaataaaaaaatgctggtattttataccagtatttttttattttattttttaatatgatttaaattaagaatgaatattattaaatttgttgaatatagggtataatataaaatataatgtatttaaatgtacttgcttttatggtaaaataaaaacttatataaatgtagttaaaataggaaccttcaaaaatttggttcagttttagataaatttagtaaaataaggaggatgaagatgaaaggcaatataacgataaaagatgttgctaaacaagcaggagtgtcaatatctactgtatctagagttataaatgattcaaaacctgtaactgatgaagtcaaacaaaaagttttagaggttataaaagagactggatatataccaaatccacttgctagaagcttagtaacaaagaagagtcaattaataggggtaatagttccagaagtttcagattcttttgttaatgaggtgttaaatgggatagaagaagttgctaaaatgtatgactatgatattcttttagcgaatacatactctgataaggaacaagaacttaagagtataaatctattgagagcaaaacaagtggaaggtatagttatgatttcatggatagttgaacaagaacatatcaactatatacaaaattgtggaataccagcgacatatataagtaaaactgctagaaattatgatatatatacagtaagtactagcaacgaagaagctacttttgatatgacagagcatcttataaagaaaggtcatgaaaagatagcttttataatgacgagtaaagatgatactgttttagaaatggaaagacttgctggttatgagaaagcactttcaaataacaatatagaattagacaagagtttgattaagtatggtggaactgattatgagagtggatacaatagtatgaaagaactattagatgatggaataatacctcatgcggcttttgtaacaggtgatgaggctgccataggtgctataaatgctatatgtgatgctggatataaggttccagaagacatatctgttgcaggatttaatgatgttaagatagctagaatgtatagacctaaacttactacagtatatcaacctctatacgatatgggagcagtagcaataagaatggttataaaattaataaataaggaattaattgaaaataagaaaatagaattaccttatagaattgttgatagagaaagtgttacagaaagaaaaaaataaaactattaaaatcaatcaggtagtgcctaaggcactacctgattttttatgtcaataatatcaaatttaataatagattaactaaaaataattatctaattacttaaatagtttatttttatctactcatgagggttagactttttagttttcttaaataaacctttagattttttttgttgaccacctggtgtattttttggtgcaggtgaatttgatttacctttagtaggtttagccttcttagttttagctggtttagtatctctttgattttctgcatctgagattttttccattatattatctagttttttgcgttgattttcatctaaaaatgctttgaattttgatactacttcatctcttccatctaagttcttacctatttttataagttcctccataagttcattttctgattttcctttgtaactatcagccatcttttctattttatccttgtcaatatttttttgtttagccattttttctaatgactctgtatctaattttttcataaaaaaacccctttctataaatatatattgaattatattcatactatttatatatagaaataatattgaagtggtgaattgtgagtgatatataatataaataaaaattcttatagataatatatatgcactgagctttaaaaatggaacattaaaatatgaaaaacatactttaatatagggcaattatataatataagggggaattgtcttgaataacttactatttttgattggagtgattgcattgagtaatggtaatatctctatatttgatgataaaaataaatcaaaaggaaataatagagttagaaaaaacaaaaaaaatgcaaatgataaactttcacagtctacacatggcaatttaaggtttgatgcaaatgatataaaaagaggtttaaggctcatggatttaagtgaagaagatttagaaatgggaatggaaataataacaagaactaaaaaatacatgtcaagagatgaaagaaaaatactaataaaaatagaaagtgttttagatttagttagaggaataaaaaaattaaataatatagatatggtagatacagaagatgaaacggattttttcagaaaaatggatagtgatgataaaaagaatatgatgataaaggaaattatagatgtattcccagaaaaaagaaaaaattcagttgaaaaagctataggaatgaaaaagaagatagatttatttgcagaattatttttaccagatgactttggtgaaggtggatttagtttgagctctttggcaaatataaacaatcttggtagtatgaataatctcaaattgttaggaagtcttttaagaggtgatgatagtaataatgatgatgaagacaataatgatgagttaaattatgaagacgaagaattagattgtgaagacaaagaattggatgatgatgagttaacagatgaaggtgaaatggaggataatgaagatgaattagtagaagataagaacacaggctatgaaaatatagaaaatgatgaagatatagtatacgatgaggaactatacaacattaatgagcaagaatccgaatacaattataatgaaaaaaatactaaaactagagctaagaaaaaacgataattaactaaatacataaagaaaaaaggaagaaaaagtaatgatagaataagattatctcaattactatataaaaccactttaaaaaattcaaaatttattatataataataatatgaaatcctgaaacatacgataaggcttttttaaattcaacctacaaatgaaatacgggagaccgtgtctggtaaattataacatgcctagttagtttggacgttaaaggttactggcaagtcacccacctgggagtgcctagggtgtgaatttacttagccaccggtgtttcgggacaaaaaaagtgctactatttcaaatagtagtactttttttattaatatgcatttttctactaaatacgcctaattattgataaattcaaaaagcaagtaacaattaagattataaaagcatagtattaattaggcttcaaaaagccaaagacttaataagaatcgcttacagggagggcaatgaaaaatgcaagattataaaaaaaataaaagaagaatgatgaatcagccaatgtctacaatgaatgaagaagaagtgtatacagatgaaataaattcagaagacatgagagggtttaaaaaatcacaccatcataatggatgtaatactgataataagtgtgagtgccatgatgagtgtaatccatgtaacccatgtaatccatgtaaacctaacccatgcaatccatgcaaacctaatccatgtgatgacaaatgtgaatgccatgacaagtgtaaatgtgattgtgaaccatgtgaaatggattcagatgaatgttttgaaaacaaatgtggaccagaatgttgtaatccgatatctccaagaaacttctctgtatcaaatgcagtgccatttgcaatagaggctaatagaatatttgatactatgcaattccaaacatttacagatgcaacaggtccaaatggagaaccattaacttttgaaacagaagtagtagaagtatttggttcaattccaagtgcaggtcaagcaagtgtaactatagaaaaaatatgcttaagtaatgatggaatagttatagacacaggaatgacaactttagaagatttcgatttagacccattaggagatatagtaggaagaaactgtgaaacaacttttgaatttgcagtttgtggagaaagaaacgctgagtgctgtagacaaggaaaaggcaaatcagtagcttataaacaaagaggattaactgtagcagttcgtaatttagtactagagctaagaggtagatgtggatgtacagagttcgttgcattagctttcccagcagttagagcaggaggtggatgtaagagaagagttgattatgtagaatttacttttaacacactttcagcaccaatatgcttgccagctgacggaagagctgttactttaagacaagaatatcaaactaacttaactgtagattgtataggaaaatctatattaaaattagaatgcaacgaatgttgtgaacctttctatgaattaattataccaaatgatatagatttagtactttgcttacaagaaacagttagcacattaataagtgaacaaatagtagttttagcatcaccaaatccaatccaaccaagacttgttgatactttctctaaagtatgtgatttttcgcaatgtggacctaatcatggaagtggaaagccaagttgccacagatagataggtaagatatatagacagtttaaattataaataaaaatcatctaaggaaggctaccaaagtgtataatttacattggtagccttcacgtttttataactagcgtatagattttagtgatttaaaaagcactatagtatgtaatagacaagtaaagattgatactatcgtcattgtgtatatgtatgcataaatattaagtcctggaattggaagaaatacatataaagctattagttgaattaacatgccagtaatagtatttatacttgaagctaattcttttcttattgaatgtaaaatgccagatagagtttgatttagggacataaatagtggaactaaaaacatagcttttagatattctcctgcaagtgtatttttaaatactaatatacataaatcttttccaaagaaataaaaaaatattgatgatagtatgcctacaaataaagtaagaagtatggagtatttgatttttttaattacactcttacgctttcttagagccatttcctgtgaaatagttggtattaaatttacaataagcgctgaaccaacagtaaaaggtaaaaatataaagggcattaccatcccactgacaataccatacatacttaaagattgttgataagtcattcctgataatgctaatcttgatggtatcatcatagaacttatagattgcaaaagtatgtttgacattctattacaagttatgggaatagacatttttaatgtttccatagaagaattataaaaatcttttatgcttataatatacctattgtcaaatgatgaatctcgccataagcaaataagcataaatataatattgctcaactcaccaatagatatacctaatagagctatataacaattcatagatttattatttatgtacataacaagtaaaaaaacaaataatattttaccaatttgttcaatgatttgtccaatagcagggatttttacattctttatgccatagtaatatcctcttagtacgtttgaaagagttattataactatagcaggacaaacagctagtataaatagatttaatttagcatcttttaaaaatttaagtgataaaaaagaactattgaaagatgcaactatagatataattagtgctacgaaaaatgatatatataaagttgatataaatagagcattagtattgtgtctatcgtttaaagcttttctctttgcaactagacaactaagtgcagtaggtatacctgttgttgtaacagctaagcaaatcatcaaaaagttaaaaatcatatgatagatacctaaacctgtttcacctagtgctcttgataagaatattttatataaaaaaccaaatattcttacaataaaattggatataaataaaataactgttgatagtactaaataaggtactttcaaaaaaatcacctccttatcttttaaatatattcacaaggaggtgtaaaaatttataattttataaattctggtttcaatttattaaatttagatacatatttaaatcccatattttttagtaatgaatatatgtagtcaaactcacatgcaacttgacttatatgatgtgaatctgaacctgtggttatgatttcccctcccaagtctttgtacatttgaagtatatacttagatggggttaggtctggaagattatatctataacaagaggtatttatctcgatacctttgccatcataaatagcttgtttaagagtttcttcaattatatcagaaaatagtctatcatctaaaatagtgtcataaggtgcataccttttaatcaaatctaaatgacctaagacagagtaatctttataattcttaacaatattatataaataaagatagtaattttcataaacttcatattgagttttatctttaaaataattaccaaggtataagtccattgtatctatagcatggatagaacatattataaagtccaatggatattgatgtgcttcctttttgtatgtatccattaattgagtttgaactccaaattcaattcctttttttattgatattttatctttgtatttgctttgaagagtctctaaactcttaaaataatcttcgtagacaattgaaaaagaatcatcagcatatacatcatagtcaacatggtctgtgaaacaaatttcctccaaaccgagttcaatagatttttttaccatttcttccattgtagattttccgtctgtagagaaacttgagtgcatgtgatagtcgtaaaacataaatatttcccctttttataaaaattttggtattatatatacatactaaataatatcaaatatatataaaagcatcaataaaatataaatacaatgagcggtgataaatttggaaaaatacagaatagatttaaatgagaaaaaatcaactaaatatatacagatatttaatcatataaaagaattgataataaataaagagttagtagaacatgaaaaattgcctccaataagaaaactatcaaattttttacaagtaaataacactactatagttaaggtatacgagcttttagaaaatgaaggatatgtatataaaattatagggagtggtacttttgtatcaagttcaaattcttataaaagcggtatagataacaggaaaaataagattattgtgcaaagagaagatttaattcattttgacaatgggaatccatctaatgatatgtttcctatcgattcatttaaaaatgctgtaaatatggcattatctaaagatggtagttcaatatttgaatatgatgaaggtcttggctctgaagaattaagagaaaaaatggtagagtatctaagtgatggaaatataaaaactactaaggaaaatattcaaataatatcaggtgctcaacaaggtatagatatagtttgtaaaggacttataagttattcagatgttgtttttatggaagaaccttcttacaatggagcaattgaagtgtttaaaagtagaggtgcaaaaataatatctatacctatgttagatgatggaattgatataggtattttaaaattaaagttggaaaaaataaaaccaagacttatatacattatgcctaattttcaaaatccaactggaatatcttactcaacatataaaaaaaagaaattgatagaattggcagaagaacatgatttttatataatagaagatgattttataagtgattttgtttttgaatcaaaggacaatagaacaattagaagttatgatgataaaaatagagtagtatatataaaaagcttttcaaaaatacttatgccaggtcttaggataggaattgtagaaatgccaaatgagttgttaaaaaaagttttatgggctaaatattcatcagatatatcaacaccaggtttaattcaaaaatcaatgtattactatatgaataattttgattggaagaattatttgagtcatatagagaagatatatactaataagtataaattgtcaaaaaacttgattaatgacaaattgagtggtaaattaaaagttagaaaatcttgtggaggaataaacttttttttagaattaccaagaggatatacatctcaagcatttacaaattttatgttaaacaaaggagtgtcaatgcttccaggaacttatttttttgacaatctagtggatgatagattctttaggataaatatagctcgcccaagcatggaagaactagaaaagggaatatctgtaataagtgataatatagatgagtttttttgtgaatataaaaacaagttagatataaaaagcaataaattattttattaaataaatagaggttttttaggaggaaaaaatgtttgacaagaagaaattagataggattaatgaattagcaaagaaaaataaagagggaatcctttctgctgatgaaatcaaagaaagagaaattttaaggaaagaatatttagaaaactttagagctcactttagatcaagactagatagtgtcaaagtagtttcaccagaagaatatgagcaatacatgaaaaacaataaaaattagaacttagtaggaggaaaatatgaacttaaagtacgaatttaagaatgcttgggattttgaaagaaaagaaaatactattgaacaaattatgcaatattctcgcaattatatggagtttttaagtaagtcaaagactgaaagactttcagtaaaagaaattataaaattggctaaagaaaataactatatttcaatagatgaagctatggaaaaaggaagcataagttgtggtgataagatttatgttataaataaagagaaggcagtagcactttttgtaataggtaaaaattatatagaaaaaggtatgaagattataggaagccatatagattcaccaagattagatttaaaaccaaatccactgtatcaagagagtaatctaggtttttttaagactcattattatggtggaataaaaaaataccagtggacagctcttccacttgctttacatggtatagttatattaaatgatggaacaaaagtggacatatctattggggaagaagatagtgacccagtattttgtgtaactgatttattgattcatttggctggagaccaaatgcaaaagaaactatcagaaggaattagtggagaagctttaaatatattaattgggaatattcctttagaagatgaagaaaaagaacctataacagcaaatatattaaagattttaaatgagaaatacaatatagttgaagaagacttattaagtgctgaaattgaagtagttccagctggtaaggctagagatttagggtttgataggtctatggtgttgggatatgggcatgatgatagggtatgttcatatgctgctgtaaaagctatactagaaactgaacaaccagaatttacttcagttgcattatgtgtagataaagaagaaattggttctaaagggaatacaggtatgcactcaaagttttttgaaaatactgtggctgaactgattgctttagaaggagattattgtgatattaaagtaagaagagctttagcaaatagtaaggtattatcagctgatgtttctgctggatatgacccaaattttggagaagcatatgaaaagagaaattcagcatatatgggaaatggagtagttttaactaagtatacaggttcaagaggaaagagtggatgtaatgatgctaatgctgaatttatgtcagaagtaaagagaatttttaataaaggaaatgtagtatggcaaactgctgaacttggaaaagtagaccaaggaggaggcggaactatagcccatatattggcaaatcaaggtgcagaggttatagactgtggtgttggagttttaaatatgcatgcaccacatgagattgtctctaaagtagacatatatgaaatgtataagggatataaggcattttttaatataaatttataagtaaaaatataaatgtaataagtgaataaaggctgttgtataaacaatttaatctgttgtacaacagtcttatttttatgtaaaaatagcaatttgtcacactagagaaaataaaagaaaatactgtcaaattaaaaattatttaaaaaaaaattgacaacgatttcatcttgttataatatgtaataaagaacttgttatataatgttataaaaatgttacatagggaggtgagcaaaatggatgaaaagagacaaaaaaaagaaatggatttagaagtaaattcctttgttcctttatatcaacaactatatgacaacataaaaaaacaaatagcatctggcatatataaaccaggagataaacttccatctgaaggagacttatgtaaagaatttaatataagtcgtataactgtgagaaatgcacttaatgaacttgtaaaagaagatatattatgtaaaaaacgtggtaaagggacttatgtaacaataccagagagaatagaagcaacatgtgcaggaaatagttttactaattcttgtcatcgtattaatgcaaaaccaagtaccaaaataatctctgttttaataaaaaaagcagataagcaagtagctgaagctttaagtattgaactagaagagaaggtaatatgtattaaaagacttagattaatagatgaagtacctgttatttttgaagttgactattttagaatagattacatgtttttattaaaagaagaattagaagataaatctttaatggaggttatatctaataatataagcacattacctaaacgagtagaaaatatatttgaagtaaaacattcaaacaaagaatattctgactatcttaaatgtgcaagtaatatgccactattgaaagtaagacaatcggtgtatacagaaaataatgatgtcttatattacaatgagcaatttataagaagtgataagtacaaatatgcagtatcagcagaaatataatctatatttagtaggaggatgaagtatgaaaaagataatattagcatctcatggagatttttcaaaagggcttttaaatgcagtaaaaatgatagtaggagatttagcagattgtgttagttcgtatggtttgtaccctggacaaagtgcttcagattttgctttagaattagaaaaaacaatatcagaagatatagaatgtgaatatataattttatctgacttatatggagcaagtgtatgtacagcaatgttaagattaactaatctacataatgttaagttattttctggaatgaatttgaatatggtattagaacttcttacaaggttttctgatgaattaacagttgaagatatagaacaattagtggaagaatctagaagaggaatacaaagcgtgacattacaaattaaagaagaagaagaggtattttagtttatgaaaaaaaagggaatattatcagtatttaaaagtaaaaaaccaattatagcaatgatacacttaaaaggagatactccagaagatatctttgaaagagctaaaaaagagattacaatctttgaagaaaatggtgtagatggaataatgttagaaaattactatggtaattattatgatttagaaagaatacttgaatatgtatcaaaagctaatttgtcaataccatatggagtaaattgtttaaatgttgatactatgggatttgaactggcaacaaaatataatgctagttatatacaggttgattctgtagtaggtcatgttaaacctagagacgaagctactttagaagaattttttaaattacaacgttcaaaatgcccagcgtatttaattggaggcgtacgttttaaatatcagccagtattatcagaaaatgacgttgaagaagatttaaaaataggaatgacaagatgtgatgctatagcagttacagaaaatgctacaggtcaagaaacatcaatggaaaaaatagaactgtttcgtaaaaatttaggagactttccattggttatagctgctggagttacattagaaaatgcaaaaaaacagcttgaattaggagatatggcaataataggaagttactttaaagataattacaaagattttgggaatgttagtgtagaacacgtaaaaacattcatggatgaaatcaaaaaaattagggaggaattataatgattaaattagtaagagtagaccacagacttatacatggacaagtagcatttacatggacaaagtttttaagcacagactgtatattgatagcaagtgatgaattattaaaagatgaattaagaatggcagggcttaaaatggctaaaccatctaatgttaagttagtaatgaaaagcatagcagattctataaaagcacttaactcaggtgttactgataaatataacttattgatactttgtgaatctgtagaagatgtttatagacttgctaaagaggtaaaagctattaaatctataaaccttggtggaacaaaatcagatgataatcgtgaaaatatatctaaagcagtgcatgtatcaaaagatgatataaagatgattaaagagttagattcagaaggcgtaaatgtatttgtacaattagttcctgatgatgatgctacaaatgtaatgaaattaatataattttagggggatgaaaatggaatttacacaagttattttgataactctaattgcattctttgcatatatgcatagttttgtaggttctacaatgcataatagacctatagttgttgcaccacttgttggtttagcactaggtaatcttcatacaggtatagtaataggttcaacattagaattagtatttatgggtgcatttcctgttggggcaagtaatcctcctgattttgtgtctggttctattattgccacagcgtttgtaatattaacgggtcaagatgtatcagcagcagttgtacttgcagttcctatagcaactctagtattgcttatagataacttcttaatgacagtagtacttacatggggagctcatattgctgaccgttatgcagaagaggggaatattgaaggcgtagaacgtgtgcaattattatttggtataggaaataaattaatattagcaataatagtaggtataggattttcattaggtgttccagtaatagaaaaaatactttcatttataccatcatatgtaactcatggaatggatgttgcagcaggcgtgattccagcaataggttttgccatgttagctaggatgatgcttaataagaaaacagtagcatttttattattaggatttatattggttgcttacctaaacataacagtaacaggagttgcattgtttggattagcaatagctttaatatatgttaactttgtaggagagaaggaggtaatagtagatgacaacgagttctaagaagttagatacaatttcacccgatagtaaaataacgaggaaagacttttggaaatgctttagaaggtcattgacattagattcatcttggaactacgaacgtatgcaaaatatagcatatgcatacatgatggcaccaataatccgtagattgtataaagatgataaggaaaagaaatctaaggctttaaaaagacatttagaatttatgtcagttactcctcatataagtactcttttggtaggtatatctggagctatggaagaagaaaatgcaaagaataaagaatttgatgctaatagtataaatgctgttaaatcaagtttaatgggtccagtttctgggataggagattcatttttctggggaacattaaagcttatagcagctggagttggtatagctttagcttctcagggtaacataatgggaccgattttattccttttaataataaatgttcctcattttattatacgctatatatgtctagataaaggatttaagtatggaactcaattctttaaagatgtgagtagttcaagtatagtttcaaaagttatggaagcagcttcaatgttagggcttatggtaattggaggtatgactgcatctaatgtaatgttaaaacttagtgttaatgtaggtagtggagaatgggcagagcctattcaaacttacttagaccaaataatgccatgtatgcttccagctatgatattcggtattatgtattggttattaggaaaaaaggtaaagacaactacgatattaatttcagttatgattatttgtatagtattagctgctattggaatagtataaataaaaaaatcccaagttcatttgaacgagggattttttgactaaattaaataaaaaagaaagatggttcataataatttataagcatttatgtgatagttataattagcttattaattagttataaacccaaaattaagcactactttattaaagttattatattataatttcgaaatactcacataatctgtttagaaatttatcttctaatggggaaaaagttttctttttagagtaaataaagaaaaattttctagtaaaatcaacaccctttattttataacattttattttacctgcattgagataatcaatagctgaaatgtacgatataaaggagactccaagacctaatctaaccatttccttaatagcctcatttgattctacatgagctattacatttaatttacttactggaaagttatttttactaagtgtgtttagtattaagtttcttgtacctgacccttcttttctcataataaaatttagataagccaattctcctatatcgatacaattatttttattatcaattttaaaatctgaaggagtgataagaacaagttcatcatctaataagtctaggtactctatttgaggattattgattttagaaccaactaatccaaagcttattcgttcatttaaaatttctgatatagcatattgagaatcataatggcttatggaaaattttacatctggataactcatagaaaaactcttcataaaatcaggtaaaatataagtttcaggtatggaactacatgctatatctataataccttctatttttcctgaatattcttttatatcataaattgcacgtttgcaattattcaatatatatatagcatgttcataaagaatttcaccagattttgtgagtgtaataactttgttgcttctatttataagaacagtttccaactctctctctaaattctgtatgtgtgcacttacagtaggttgagttaaaaaaagttctcttgcggcctttgaaaaactctgatgttttgcaacagcaacaaatacttcaagttgtttaaaatccattatttaatcctccttaaattatctaaaactattataacatatttgataaattaatagtcaaaggtgatttttaaaatagaaaacctttaaatattcatggagtttttgattgtttaggaataatttggtataatattgtaaggtacttacaataaaaatatcgtaaattgaattttcaaaattcaactttaaagtgttttttattacagaaaaattacaattagcttcttaatcttattaaattcaaataaatattatataattattttataatataataaatataattattgaaaaaagagataactgtaaattgagatatagataaatactataaaatttaagaaaggaggattgatttatgaagttaaaaaggtcattagtttgtgtaactattttaggtattatacttgttggatgtcataaagaaaatactaaagagaaaaatcaagtagcaagtaaagcaacacagcaaaaaactatgacaaaagttcaaaatgatgttaatgaaattatgaataaagattataagtacattataaagaatatgggtataccttataatacattttattatataaaacctaaagttttaaaagaatcgaatacaatgcaagatataaatacatcaagttatatgacattagtttatccaaaatatactggaaatgatgaactagatggaagtgctttatatgttgatattaacgaaaataaagttgtcaatgttgaaaccaattctttctcatcacaaggtatatcagtcattgatgctgaatctagtgttgtgattgaaaaaagtgaccatgaaaaatcggctgtatcactagaaaattttagacgtattgacctgggagagtatgttggtgttgaagagtctagaataaatgaaattgtaggagatgcgaattatgatttaacagcatataatcatgaaggtagtaaagtagttaagagttatagattgaaagaagataacaaaatattaaaaaaagaggtacttacaataagtattgtggataacaaaataaaatctataaaaactattgaaagtgataaaattgtaaaaataataaaaggaactttattagaataaaatattctaaagcatatgatgctgtttcaagatagaaggaaatttctagctgggaacagtttttttattagatttataaaatttgaactgcacttatagataactattagttataattaaatataagataaaagtatttccaacttttataatctataatatattacatagaaatatcttaaataaaaaatatattggggagtatttaaaatgatagaattagaagatgccataaaaattattgaaaaaaatgttttaccaataaacagggtcaagatagtaaatcttatagatgcagtaaataaagtagttgcagaagatatatattcaacaattgatagtcctccatttgataggtcaccctatgatggttatgcatataatgcaaattctgaaaatagaaatttaaaggttatagggactttgtatgcaggagaagtatttaataaggtattaaataaaaatgaagcagtgaagataatgactggtggaaagataccacagggtgcaaactgtgtaataaaaaaagaagatgtaacggttataggtgatatgataattttaaatgtaaaattaaaggaatacgataattacatatttaagggtgaggatataaaaaaggggcaattgattattaataaaaatcagaatataggatatgatggtattggagtattagcaagtcttggaatatccaaagtaactgtttatgatgatttaaaagttggaattttgaatacaggtacagaactacaagatataaatgagactttagagaatggtaaaatatacgatagtaatagatataccttatattcaagattattaaaacttggaatacaggcagatacaatatgcaattgttctgatgatatattggagttagaaaaaaaggtaaagaatatgttacagagtgtagattttttaattacaacaggtggtgtttctgttggagataaagatttaattccagatgtattcaaaaaaataggggcaacagaattattttggaagataaacattaaacctggtggagcttgttatgtaggtatattgggagaaaagctattatttggtctttctggtaatccacatgcagcaatagtggtatttgataatgtgatagttcctgttattgagtatttaacatataagaagggaatacatcatataaaagctatatttaaaggagaatttaataaactttcaaataaagatagatttgtaagtggaaaactatatacaagtgaaggtaaattgtatgtagagctaaatgataagaaagatgcaaaagctagattatctgcaactctaagaagtaattgtatgattaagattaaaaagaatgagacaataaaagaaaatcaattagtggagattgttattagatagttttatgaaaggacacaattttatgtataatatattgtcagttgtctcatattcaggagtaggtaaaactacgttgattgaaggcataataaaagaattaaataaaaaagggtatcgtgttggagttattaaacatacctgccatgattttgatatggatgaggaaggaaaagatacttataaacatagaaaatctggggcgagaaaagtctgtataatatcagataaacgagtagcatatattgaagaactaaaagagaagaatccattatataaaatgattcaattatatgaagatatggacttgattatcatagaaggatataaaaattatagatttaaaagattggaagtaactagaaaaggtaagtatgaggatattttatctaataagtctgatttgataggtattgtcagtgatatagaatataaattgaatattgaacagtttaatttaaatgattataaaaatatatcaaagtacatagagtcttgtataaaaaatgaaattttaagtataagcaatgttgaaataaaaaacatattaaaagaataattttaagatgttcttcttatataaaatgatataattatttatataaataaagatataagaaatttatcaattttattttgagttataaaatattaaagaaattgtaggaggacaatatatgaaaaaaatattagtagcatgtggagcaggaatcgcaacatcaacaatagtttgtgacagagtagaaagattggttaaagaaaataatatacacgcagaagttgagcaatgtaaaattgctgaatgttcaacaaaacaagaaggtgctgatttaatcgtatctactactatactaccaacaacttatgatatacctacaataaaggcaacaggatatataacaggtataaatacaacagcattagataaaaagatattaaatgcattgaagtagttttgtgtttataaaaaaaatttagtattaaatatagagttgtatctttataaaattttaaatatagagatatagctctttttatgctgtttcaagtatacaactatatgatataaatcttcaattttatgaaaaagattgttattactttgtaagtttataaaagatttaaagttattgttatgttatactaatttatgggtattttttagaagtactatatagaagtactaataaaggagggatttaatacttatgataaaacaatttgtcaaatattataagccatataagaaaatttttacactagaccttatagcagcttttctattttccttatgtgatttagtttatcctatgataactagaaatataatggatgacgttgttccaaataaaaacttaagaatgttagtagtttttgcagtagcacttatacttatatttatagcaaaagcagggcttaactattttatgcagtattggggacatgttattggtgtagatatgcaagctgatatgagaaatgaggtatttacacacttacaaagacttccaaatacgtattttgataataacaaatctggagtaactatgtctagaatagtaaatgatttaatggatataacagaacttgcacatcatggtcctgaagatttattcatttctatagtaatgttggttggttcattctttatacttatagatataaatattcctcttacgcttataatatttgctatattaccgtttataatttggtttgcaatagctaaaaaagataagatgaatattgcttttatgaagagtagagttactataggtgatgtaaatgctactttagaaaatagtatagcaggtatgaaagtaactaagtctttttgtactgagaaagaagagttaaataagtttgtaagaagcaataaattatttagaagagcaagacaagattcttataaggtaatggcagaatattactctggtatgaatttatacatggatatcttagagtgggtagttgtaatagctggtggttattttacttatataggaaaaattactttgggtgattttgctgcttatatactatatgtaaaaatgtttatacaacctatgaaaaaattaataaattttacagagcaatatcaaaatggtatgacaggttttaaaagattcatagagataatggaacaagaccatcaaaaagaagctaaaaatcctattgaacttgaaaatgtaaaaggtgacattgagatagaaaatatatctttcacatatgaagataagactcaagttttggataatttaagtttatctataaaagctggtaagactatagcattagttggaccttctggaggaggaaagactacattatgtaatctattgccaagattttatgaatttgataagggtgatataaaaattgatggaaagagtataaaagatgttagtttaaaatcattgagaaaaaatataggtatagttcaacaagatgtatttttatttacaggaactataagagataatattctttgtgggaaccctaatgctacagatgaagaaatgatagctgctgctaaaaaagctagaatacatgactttgtagagactttgccagatggatatgatacttatataggagaaagaggcgtaaaattatcaggtgggcaaaaacaaagaatttcaatttcaagaatctttttaaagaatcctccaataataatattggatgaggctacatctgctttagacaatgtaacagaaagagaaattcaagagtctttagaggaattaagtaaagatagaacaaatttagttgttgcacatagattgactactataaaaaatgctgatgaaatcatagtattgacggataaaggaattgaagaaagaggtactcatgaagagttagtaaacaaaaatggagtatatagtaggttacacaataactagtatacaaattttacaccatagctaacatacgcattaaacttacaaacataggatatattaagattcataaagacaattcattttatatttatgagatgttttatgaataaaatgtatcctatgttttattttttgcaaattacatttaattctctttgtaagaatagagttaaatagccaatggtcaggataacgtttttacaaaaagaataatttagaaaactaactttaatttatggaatttatcgaattttatgaaaaaaatcgaattttgacttgaaatgtttttcaaaagtagtaaaataatggataactatacatacattttataaaaatacatttattatgaggggggattttgtatggaggcaataacagctttttgtctagttttaatatcactgacgataggagatatagtttcagcaaaaactaaagcttttgttccgtcggtttttgtatcagcaattatatttatagtaggattctggacttttttcccagaaaatattgtggacttagccgctttaggaacaccattagctcaattaggtatgcttttgttaataactcatatgggaactatgatgagtattaaggaattagcaggtcaatggaaaacaatagtaatagccttggcaggaatagtaggaatatgtgtaggtgctttggcattagggacaatagtatttggatgggatacagcagtaatagctacacctcctcttactggagggctagttgcatctataatgatggcagatgctgctacagcaaaaggtcttgcaagtttatcagtacttgcaattttgatgtatgttgcacaaggatttgcgggttatcctattacagcattaatgcttaaaaaagaaggaaaaagacttttatcagactttagaagtggaaaagtaactgtaaatacagatgaagaaaaagttaaggatttacctgaacaaaaaagcagatttaagataattccagacttaccagaaaaatatgatacgacatatatgataatacttagattaggatttgtagcatggttagcagtacaatttacaaatcttacaaatgaagttgtatcaagatatgttatatgtttaatatttggtgtaatagcatcagaacttggaatagttgatagaaaaccacttaataaatctggttcatttggatggttaatgacatcattgatggcttttatatttgcaggattagcaaaagctacaccagcaatgcttgttgaaatggcagttcctcttgtaggaatcataatatttggtgtaataggtatgggaatattctctattatagtaggtaagcttttaggtgaaagtaaagaaatggctttttcagtttcgcttacatcactttatggttttccaccaaactatatattaactgaagaggcagtaaaggctttggctgaaacaccagaagaaaaagaatttttaatggataagatgcttccaaagatgcttgttggaggatttactacagttacaatagcttctgtagtaatagcaggtatctttgtaaatctaatatagtatttaagtgataaaaagtattttaaataagaagaatgtgtactacttggaggtatggaatggatattaaagaaataacaaagagttataaagactatgtaattaagcttagaagggaatttcatgaaaatcctgagaaaagtatggaagaagttagaacatcaaagagagttaaagaagaacttgataaaatagagataccatatgtatcagctggaggtacaggtgtaattgcaactataaaaggagctaatccaggaaagactgtagcacttaggggtgatatggatgctctacaagttgttgaatgcactgatgtagaatacaaatctaaaaatgaaggacttatgcatgcttgtggtcatgatggtcacacatcaatgcttctaggggcagcaaaagtgttaaatgatattaaggatagtatcaatggaactgtaaaattattttttcagccaggagaagaagttggtaaaggtgcaagagctatgattcaagatggtgctatggaaggtgtagatagtgtgtttggaatacatctttggactgatgtagaatctgggactatatcggtagaagaaggaccaagaatggcttctgccgatttctttaaaattactgtaaaaggtagaggtggtcatggttcacttcctcatcaaggtgttgatgcagtgcttgcaagttcagcaatagttatgaatctacaatctatggttagtagagaagtaagtcctctggaaccattagttgtgagtgttggagttttaaattctggaactagatttaacgtaattgcgagtgaagctgtcttagaaggtacaataaggctatttaatccagagcttagaaagcaaattcctggaattttagaacgtatagcaaaatctacagcagaagcatatagagcagatgctgaattagagtatgggtacttaacaccagcagttataaatgacaaagaatgttcaaagatagctacagatgcagcaattaagctatttggagaagactgtataacactatttgaaaaagtaacaggagcagaagatttagctgagtttatgaatatagcacctggtgcactagcatttgtaggagctagaaatgagtcaaaaggtgcttgctatcctcatcatcatggatgctttaatatagacgaagatgctctagaaattggaactgctttatatgtgcaatatgcagtggatttcttaaataaataattttaatatactataaagaaaaagcagagactaagtttatatctctgcttttttattgtgtatattttttataaatattgactatataaaatatatatgatagcataaagaaaatgataatcaatatcaattaaaaagaaggtgatttatttgaataatgtaatatttgcatttttgataacattattggctggtttatctactggtataggaagttgtatagcattttttgctaaaaaaacaaatactaagtttctttctataagcttaggattttctgctggtgttatgatttatgtttctatgatagaaatttttcctaaagcacaagatgctttgacaaaatctatgggagagaaattaggaagttggtcaactgtaatagctttttttataggtatggctatcattgctgttattgataagttaattccacaagaagaaaatccacatgaaataaagaaaatggagaatatagaagaaaagaatatcaaaaaaaataagtctcttttgagaacaggtatatttacagcaatggctatagcaattcacaattttcctgaaggattagctacatttatatcagctcttgatgatgttacaatagctatcccgatagcaattgcaattgcaatacacaatataccagaaggtatatctgtatctgtaccagtttattatgccacaggagataaaaagaaagctttttattattcctttttatctggtatgtctgagcctttaggagcgattattggatatgtacttcttagaaattttttaaatgatataactcttggaattgtatttgcaattgtaggaggaattatggtattcatatcactagatgaattattgccatcagctagagagtacggggaacatcatttatctatttatggattgattgcaggaatgggtgttatggctattagtttattactatttaaatagctttttaaatatatgattgtaacctaaaattagtatcaaaatgatataattatttaaatagatttttaagctatttaaaaatatcattttggagaatgagtgctatggaaaagaaaataaaattcaaatttgactggtatagttcacctgataagatagagaaatggttagaagatattgaagctaaaggatataatttatataagataaataaatttggaggaatattttattttcataagggaagtccaagaaaaataaaatacactgttgattactactatgatgtagagaataattattttgatgaacataaatcaaatggctggaatcttgtatttaggagtattggtagttttatgggtacatctgcatggtatatatggtcgaaagaatacaaagacatacctcctaaattatatagtgattctgataaaaaaaacaaagtaaagtcaattttatttatgaatatgtttatattctttatgttagtagtaatatttatatatttattgaatattgaaataagaaatttatatagtggttatggagcatctgtaactgctattgtactacagattatattgttgattttatatgcagtacaattatataggagattaatgtattatttaaggcttaaaaagtttaaataaataaaagaaggtgtcctaaaattatttttttaatattttaagacatcttcttttgttagtaaagtactgtttttaattatagtaatttctgtctttaaattgaaatatcaaataatagttgtattggattgagtattgataaaaataatttaaaaatgttatcctaaagtatcagatatacaaaattatctttaaatatattataaatattttaattgtattaactagaaattatgtaaggaggcattttatgattaagatagcagtttgtgaagatgaaaaagaaacacaacttttaatagaagattaccttgagaatatattaaaagatataagtatagaatatgagatacaaaagtatatatctggagaagagttactggaaagtaatttaaaagatatagatatattacttcttgatataaaaatggaaaaattaaatggaatggatactgcaagaaagattagagaagtagacgatgaaatggaaataatatttgtaacttcattaatagattatgtgcaagaaggttatgaggtaagagcttataggtatttactaaagccaatagagttggaagaactaaaaaaacatgtgctaacttgtatcaaagatattgaaataaataaggaaagtcatattacaataaaaaataagtctaatacatataagatttatttaaatgaaataaaatatatagaagttcaaaaaaaagatatgctaatacacacaataaacaagaattttgatataaaatatagtttaggtaaaatagaaaaagaattaaatccatataaatttataagatgccataaaagttttatagtaaatttaagatatgttgaaaatataaagcctaatgctgcaatactggaaagtggagaagaggtacctattagtagatatagatataaagaagttaaggagaaatttttaaaatttcttggtgatacaatatgctaaattttatgaatgagctattagtagttttatctatatttatacagttttctataatgaacggaattttaatttataaaaaggatagtaaaaaaaatgaaaaaatagtattctatattgtcttgtttcttatttatattataattcagataagtagattatttaatggaggaagttactttagtaatataaactatttattttatatattagcatttattgcttggggaggatactataattatttttataagatggattatattaagtattccattttcttttatctatttagtgtatattataaatgtttggatgctgttatatatagaatactattttttgcaattacaggtaatgttatttcatctaaagaatccttattagtacctcacttagaatctataaaaattcagatatatagtaatttaataattattcttatatatcttgtatttagcttttttaggaagtctataaaattaattagccaagataagagaaattatgtatatttattatttgccttattagctaatacaatgaatatgcttgtaaattatgtattaaaaaaattagaacggtttgggtcattacattcagaaggatactattttgataattttgttaatccaaagttggtaggagctagtagtatatttcttatattattgtttaaagaaataataaaagagaatagattaaaatctcaagctgaattaataaaaaataagttagatatgcaatatgcgcattatttaagtattcaagaatctcatatgcgagttaagaaactatatcacgatataaataaccacatttattgtatagacaaccttagaaacaatagcaaagaaattaatgaatatgttaacaatttaaaagatgaaataaaaacatttaaatatatctataatacaggaaatatgatattagacattataatcaacgaaaagagtgaaatatgtttaaaaaaaggaattaaatttacttgctctataaatttttcaaaagtaaattttgtaaaacctatagatgtgtcaagcatattttctaatattttggataatgcaatagaagcatgtgataaaatagtggatgaaaatattaataaatatattagaattaaaggaactataacaaagtcattttttgtacttaaatgtgaaaatagtaaactaaatcagcttacttttaataaaaatatattgttaacaaacaaaatggataagttcgtacatggaataggtattcagagtattaaatcttctttacaaaaatataatggagaattattatttgaaaatagtatcgataaatttatactaaatatatatataccattggagcaagatactgacagttggggcgattaagttaccagttgggacatatgtattgatacaaaaaaataaggatgttatcttttaataacaaaagataacatccttatttctgtattaaggagcttataattttactaatagtaagttataagaattggataggaaggtgatatgtattgaataataaatctttaatataaagaaaatataaatatattctaatgcaatgaataatactttagagcggttagtgtgatgggaggattgtgtatgaaagtaaaaaggaatataaatagagtggcaataattgtggctttaaatcttagcttagcattgatggcaggatgtatgtctcctgtatctgataagaacttaagtagctcagaacaaattagtaaagattcattgaaagaacaagttgaagataaaaaagatgaatctatcgagctatttaataattactcacaaaagattaatgatgcgaaaggtagagaagaagtaaaaaaagatttatctcaaagattttcgaaagctataatagacagtggttatagtattactgactcaaaatcagatggtagctttgtagtatctataaatggtgctgaaaaaccacctgaaaaaaatattcgaagtttattctattctatgtctgaagacgataaagaaggaaaagtaacaatagatattctctgtgctaaagagtatccagaagatgataagttatctgagagtgataaatatattaaatttatatacaatttatttaaatcattgactaatacgaacttaactgagaaagaaattttttctatggttgaagaagaatttaataagggagtaggtgttgtggagcttccttatatgaaggatatacatgttgaagttaacaaagttaaacaatcaactaaggttttaaaactaagtctagtatacaaatttgatatttcaaatcattagtatattagaaataactataacaatatagaaaatatatcatagaaaatttttttagattttataaatttaacaaaaaaagtattaatatataggtgttcaaggtagatgaaaaaaaaagttattttgcttccattttatgctaaaggacagtataatataattaaagtatgttataacatacaaaaatgtagtatatattatccaaagggggattttaaatgagtcaaactaatagaatagaagcatttagacaagaatatattaattctaaacctatgatatgttgtgaaagggctagaatttttacagaatcacataaaaaaactgagggagaagctatctgtataagaagagctaaagcttttttggagacatgtaaagaacttcctataaaaatctttgaaaatgaattaatagtaggtacagcaggaaaatttagaagaacagggatattgacaccagagttttcttggcaatgggtagacaaagaaatggatacttttgataaaagaactcaagacccatatgtaatatcaaaagaacaaatagaatttataagaaaagaaatatttccatattggaagggaaaatctttggaagaagttttcttagcaagaatcccagaagatacagctaagatattagtagatacaggaataatagataatgattctaagtggagacaggcagttggtgaagtaacaccagattatcaagatatattgtttgtaaaaggatataaagggattaaggaagatgcagataaaaaaattaaagaattagatatatcagtttcagaaaatattgaaaagatagatttttacaaatctgtttctatagttgcagagggtattatgacattggcacaaagatattcaaatcttgcaaaagagatgagtaagcaagaaacagatgaaaagagaaagttagaacttataaaaatttcagagatatgtatgaatgtaccagcaaaccctccaactaatttttatgaagcaatacaatttgtatggtttgttcaattaggtggtattctatcagaaaatccattggcattaaatttaggtagatttgaccaatatatgtatccatattatgaaaatgatgctagagaaggtaaaataactgaatcagaagctcaagaattgatagaagcactttggattaagttatcagaatgggtatggactatatcagcaaatacagcaaattactttgcaggatataatcaattccaaaatcttactgttggtggtaaaaagagaaatggtactgatggaacgaatgatatctcatatatgtgtttaaaggctacagaaagtgtaaaaactcaccagccaggattaagtgttagagtgagtcaaggagcaccagataatttcgtaatggcagttgctaaattggtaaaacaaggaactggtttccctgctatacacagcgatagtgcaggggcacaaatgttattacaagatggatatgatgcagaagatgctagagattggagtaactgtggttgtgtagttcctcattttagaaaaacaggacagtggacttcagccgtaaatatcaattttgcagcagctttagaatatgctatgaatgaaggtaagagtagattaactggagaaaaaatggggttagatacaaaaaatatcacagaatttacttcttttgaagaacttaaggatgagtttttaaagcaattagcatatcttgtaaaaagttctgttataggaactactgttgctcaacaaattcataaagaaatggtaccaagaccatttttatctacttgtgtagatggatgtttggataagggagttgatttaagtaaaggaggagcaaaatataatataggtcctgtattaactggtatagggttaggtgtagtttcaaattcattggcagctataaaaaaattagtatttgaggataaggtgactacgctagaagaattaacaaaagcactaaataatgattgggaaggttatgaagaattaagaaaacttgcgttggatgttcctaagtatggaaatgataatgattatgtagattcattagcaattgaagtttctgatttttattatactgaaactagaaaatacaaggatatttttggctctaaatttaatagtgcatttatgggtatatcaaactatgtaccaactggaaaaatcgtaggtgcaactccttgtggaagaaaagcgacaaaacctttgacagagggagtttctccgtttgttggtactgatacaacaagtccactagcagccatgaaatctgcatcaaaaataaatcatgatgttcatactggtggaacacttctaaatttaagactgaatcaagatttggtggaaactgaaagaggacttagaaatctaacatctatgattaaatcatattttgctttaggaggattccatgtacaatttaatacgatatcaaatgatactctattaaaagctcaagaaaatccagaagaatataaagatttattagtgagagttgctggatatagtactcaatttgttaatttatcaagagaaatgcaagatgctataatagctagaaattcacatagcaatttttaattatgaggtagattatgagtaaaaaaggtagagttgtaaaagtacaacatttttcagtaaatgatggagatggaataaggactactatatttttagaaggatgtaaattaaaatgtaagtggtgttctaatccagattcctggagtaacatagtaaaattaggtgttatgaaagataaatgtgtatcctgtaatagatgtatagatgtttgtcctcaaaatataagttcactatttgatagaacgcaaataaataataaatgtgatttatgtggagagtgtatcaaggtatgtcttaaagatgccatttgtataatgaccgaaaaaatgagtgttgaagaaatagtagaggaagttgaaaaggattttatatttttctttgaatctaatggagggataactttttctggaggtgaacctacacttcagattgattttttaagagaattagttgatattttttatgataaaggcataaatattgcaattgaaacttgtggatattttgattggaataaggtaaatgatgtatttgagaaaatagaccacatatttgtagatataaaatctatggatgataatattcataaagaatatacaggagtaagtaataaaattatattagataatatatgtaggctttcaaagttgaataaatctatggttataagagtgccaattatttatggagtaaatgatagtgaagaaaatataagaaatactgcattatttgtcaaacaaaatgttccaggaggcaagatggagttacttccatatcataaatttggaatcgataaatataaggcattagggcttgaagattatatatatgaatttgatgaaatttgtaacaatcatatgttaaaattaaaagagatagtagaacttacaggagtaaaaatcatagaatacaaatagctatcaggaggattttaacatggataataaatttcctaatgtgggagaaaatttaaggttattgagacaagaaatgggcataagtttagacaaagcttcaaagatgacaggtgtcagtaaagcaatgcttggacagattgagagaggtgaatcaagtccgacagtatctactttatggaaaatttcatctggatttaaaataaattttactacactattaaatgaaaatacaaatacctatgaggttataaagaaagaagaagtagagcctattgttgagcaaaaagggaacatgaagttatatccaatatacccttttagccctcaaagaaggtttgaactttttataattgagcttgaggaaaactgtactcatgtttcatctacacatagttatgttttagaagagtatgtactcgtaatagaaggtaaacttgaccttaatgtggatgggaaaacttatattttagagtctggacattctattaggtttgatggaactttagagcatatatataaaaatttaaataaaggaaaaactatatttcacaatatagaggtttatagataattttatagttatccttttctaaaataaatgaaaattttagaaaaggataacttatttttataatgtcgaaaagatttatatgtatgtgatgatgttattgttttaaaaaaaacataaaagcattataataatattaacaaaatagaataaagaggaagagaatatgattataaaggtttcaatgacagtattagtattaatattattgtatattctgtataagtatgaaactcagcatatagaaacgacagaatatactattttcaacaaaaaaattccaaaggaatttgataactttaaaatagttcaagtgagtgatttacataataaggtgtttgataaaaataataaggtattgatagataaaattgaatcattaaacccagatgttatatttataacaggagatttagtagatggagaaaataaaaattttcaagttgcattagatttaatagataatttggttgaaaaatatgaagtatatcatataattggaaatcatgaacaaaaatctttaataaaaaagtataaacatctatataaggattattttaaggaactatattcaaagaaaataataaatatggaaaatgaatctgtaagaatatatagaggtaatagccatcttaatttatatggtttaattataccattggaatgctatccatatttatttgctaataacaaaaaattagaactaagtgacaattttgtagaagacaatctaggtaaagttaatgaaaatgaatataacattcttttagcacatacaccatttttctttgaaaaatatgcaaaatggggagcagatttggttttagcaggacatgttcatggaggtataataagaataccttttgttggaggtgtattatctccaaatagagagttctttcctaagtatgactggggaaaatatgaaaaagataatagcactatgattttaaataaaggcttaggaggctcaaaagttttaattaggcttaattgtaaaccagagatagttaagattacattgaagtatgagaaataagattttatataacatatataaacatcaataacatataaataaggttgatgttaaatccatttaaacatatataatgaccaattttgaataattgttgaattaataaaaataaagtgctatttttagcatagaatatttaaactatgggggggagtaaagaatcatgggtgatacaagtagattttatgagtctgtaaaaaataaatatccgaaattaaaagatggaactagggttcatctgtggccaaaagaaaacattataattggtcctatttatgatgaagaagatggatataaaaaaagtatcggaaatgtggatagcttaagttggaagcaaattgttatactggctgaatgtgatgggaaaaatactactgacgatataataaatatattatccaatagatatagaaatatccataatatgaaagaaaaagttatggaattttttatgttttatgagaatgtatacttaacgtttgaagatgatatacagacactatcaagtgtatttgagataacaggaaataaatcatacattactcctttgtactttactatagaaatagatggagataataatacaaatgattatttttctgaaatcacaagtttattgaactgcatgtatgagaaaggctgtagatttatagaggttattggtgaggatattttaaaaaataaaagtatgagagaaatatttcaatatatgttagaccattttgatttaattgtggtaactaaagatagctttactattgatagaagcttaataaaagaattagataattatcgtcataaagtgatatggaaagtatattcaaaaaatgatgatacacgtattaaattaaaagaagatataaaaataaccagtttaataaaaaggggtcacactgtagtaagaggagacagagaaaaagcaataaaaatagaagatatgaggtttaaagatacaaaggagaggttttcaaaatatggagcagagtggagtcatttatatatttcttctgatggtagtgtaaaatcttattcatttcaaaaagataaaagagtctatttaggcaatatatttaacaattctgttgaagaaattttcttagagatgcaaaataaaattgacaaactagaaattgtgtatcaataagggtaaagtttaagatttatataagatttatagattgtttatttaagtttgtgtcaataattataatgaggtgaaatgacttgttaaaattattggacaaatttttttatgatgttttacttaaattttggctgtttatgatgctgtggatttttagagaactttttacaaatttcaaaatgactaaaaaatttaaatttcataaaatatttatgtaaaaatcatataaaattcatatagcatatgtatcatatgaggtgtagaaagactagcttaaaaaccataatataataccctattgtaatgataaccctccctcacatcctcaaatagagttatcattacaagaattaatccataaatttaaaatttatggtttttttttatttaatttgttttattatattagaatatgatttattatagaatatataataagtaatatagaatacattaattaagtttttgaaatgtaactatactaataaggaggagtatttatgaatgtaaataatcacaagtgcccagagtgtggtgaacatagtaaaaagtttgaaatagtagaggaaaatgaggattgtgtaatatttgaatgttacacttgtggaactatatctatattaaagtattgtgagaactgtaaagaatttgtatttgtaaatattccaaataatgtggagacatatgagtattgttgtggaaaatgtaataataaaatttaatataatataaacatatgtaatttcatatatcatttataccaatctcatataaaattcatatataaaatgtattatataaatataggaagaactagcttaaaacataatataattaccctaaatttataatgacaactctccctcacatcctcaaattatagttgtcattatagaataacttggctgtttcaaaaatgtgaaatcattttagaaacagcttatttttttataaaaataaagaaggcaacgggaagccttctttcgtgtaaaaaaagtttaattttttgttaagatttgtttgttattttatattacttttataatatgtttttatttggtggttggcaatggattttgcacaactggtcattattaatgtaaaagtggaatattattaataaataataattacaaaattgtaatctttatttattaaataaatgagtaaaataatatattaatgggtatataattaagacaatactagtttggggaggataaaattatggattataaaacaatcatattaaatagaaagtctgttagagaatataagaacatagatattaaagaagaatatcttagtgaaattaagaaatactcagaatcttgtaagaaactagttccagaaatagatgttgatgtaagaattatgaataaaagtgaagtttttaataatttagataaagtagcagggtacaaaggaaatatgatagattctccaagttatattataatattatctgacataaaagataattacattgaaaattcagggtacataggagaaagtataatctttaaagtaacagaacttggaattggttcttgttgggttacttttgaagatggaaaaaaggtaaaagaaaaacttggaattaattcagataaagaggtaacaggaattatagctattggatatggagaaaatgtaagtaatgctaaagtattaaatgctacaaaaactgggcaaaattattcaaaatctgatatgcaagttgtaacagataaggggtctactagactaggtgtagaagatgttgtttatatgaacgaatggggaaatgttgcaagtatagaaatcttagaagaaagagcacttcttgatgcatttcactatgcaagattagctccatctacattaaatagacaaccatggagatttatagttgatggaggcactgtagttttagctgttagaaaagatggtcatactaatttatatgaagaaaaaatagacattggtatagttatgctttattttgcaacaataataagtgcaactatgtttgatttaaaatggaatttaggtactccagacaaagattataaagtgccagaagactataagatagtaggatattgtaatatataagatagtttaatacttaatttaactacacttaaattaatttttataaaaagttcaataatattttataataaaatgttattgaacttttttattgtataatacaatttttatatttattgtattgattgaaaaatacttatgaatttaaatgcttacaattttgtgcatgaatagagaggtatattattttattaaactgtataatttgcttggaggtaatatcaaatggaatggataaataaattaaatcaagctattacttatattgaagaaaatctcgaaagtggagtggattatgcagaagcagcaaaaattgcatgttgttcaacctttcattttcaaagaatgttttcatatattgcagaagtaccattatctgaatatattagacgaagacgtatgactaaggctgcatttgaacttcagaacagtaacatcaaaattttagaactatctgagaagtatggttacgattcaccaacatcttttaatagagcttttcaaaatatacataacatttctccatctgcagctagagcaaagggtgttgttttaaaagcatatcctaagatgacattaagcatttatgtaaaaggaaatgtagaaatgcaatatcgtattgtagaaaagaaagggtttcgtattgttggtataaaagaaagtatgaacatgattgtagaagagtgctttgagaaagttcctaagttatgggctaaatgcataaaaaatggaacaattgataaactttcagagttaataaataacgaaccttgtggattgcttggagttagtgtgtgtacaaatagtaagggtttagattattatattgctgcaccaacagataagcctgtattagaagatactcgtgaatacttaataccatcaggtacatgggcagtatttgaatgtgtttctccaatgccaaatgctctggcaatacaggaattgcaaaaaagaattattactgagtggttaccaagttctgggtatgtgtatgctaacttaccagatattgaactttatcccaatggcgatatcaatgctcctgattatactacagaagtttggattccaattcagaaaccaagttaaagttaatgaataacattaaatttaataaacaacatgaaattttaaaattacaggctgaaaatagtctgttatttttttgtaaatatggaaagcaagctttacataaatgaaatatagttgtataattatggaaagtagactttccgtagttgagatattaaagggggatagatgtgaaaaatagattagaagaaataagaaaagaaagaggcataaaacaagaagaacttgcttctattttgcaagtatcaagacaaactataggttcattagaaaatggtaggtataatccttctatcatcttagcctttaagatagctagatactttgattaaaaaatagctacgcacacttgtgactttagtcatgagttagtagctaaaatagtcagcatatagggaaacttatatgtagagataggatagaacctatccaatactacttgaattgctaaaaacccctaaagctaaccaaactaaaacataaggatgaaataaacctaagtgtgaaagttacgaaagtagaaaaaattggttagatggtataaggttaaatcctaagtactttaaaatgggcaatcagcaggtaagctccgaataggagaaacttcaacgactattcctcttgagggaagtacactacaagctattggtagtggaagtgggtagaccttaacggataatgccgaaggataagatatagtctgtgcttacatgaaagtgtaagaagttcataagagaactgcataggtagtagcgaacttatgtgaacgacaacctcaaaaatgataaaagttaagacttacggttcttatatatgttatttaaaaataaatataaaaaaccttcaaaatacttgttttaagtaattgcatattttaatattatgataggtgatgaaaaatggaagttactcatggtagaggatatgcatataatatgtcaaatatagacatccagtattatggggagacatctttggaatcctagttatttcgttgctactgtatcagaaaatacagaggagcagataagaaaatatattaataatcagaaaaaacaagtaaagtgaggtggcagtagtggaaaaagcttataagtttagaatgtatccaaataaaaaacaacaagagttaattaacaaaacttttggatgttgtagatttgtatataataagtatcttgctaaaagaatagaagtttataaaaacgataaagaaacttttacttataaacagtgtagttctgatttgaccaatttaaaaaaagaattaaaatggcttaaggaacctgacaaattttcactacaaaacgccttaaaagatttagataatgcatataaaaaattctttaaagaaaaagcaggatttcctaaatttaaatcaaagaaaattaatagattttcatataaaactaactttacaaatggaaacattatgtattgtggtcaatatataaaactacctaaacttgatatggttaagataagggataaacaagtacctaaagggagaatacttaatgctactatatctaaagaaccaagtggtagatattatgtatcattatgctgtactgatgtagacattgaagcatttgaaaatactaacaatcaaataggtttagatttgggaattaaagaattttgtatctcaagttgtggagaatttatagaaaatcctaagtattttaagaagtcattaaacaaacttgctaaattacaaagagaattatcgagaaaaacaatcggtagtttaaatagaaataaagcaagattaaaagttgcaggacttcaagaacatatagctaatcaaagaaatgattttctacaaaaactatctactaaattaataaaagagaatgatattatttgcatagaagatttacaagtaaagaatatgattaaaaatcgtaaactatctcgcttaatttctgatgtatcatggtcagaatttattcatcaattaaaatacaaggctaattggtatggtagacaaattgtaaaagtaggcaaattctttgcaagttcacaaatatgcaataaatgtgggtataaaaacgaggaagttaaggacttaaatataagagaatggatttgtcctagttgtaatgaaactcatgatagagatataaatgcaagtataaatatattaaaagaaggattaagattaataacaattcaaaataaataacgtatgtaagaaccgtaggaactacggggatggcctgtggagaattagtaagacatattttagtatgcaaaattctgtgaagcaggaaccctgtgactttagtcatgggaggttcagatgagtattgaagaaatatttatttatgaggaggagtaaaaatgaaaaagaatatgttatatcttggaatagtatattttatttgtggaattttacttgttttattggctacgtttactgagttttcatttgaggcttttatttggggattatctggagctgctttaggtccaggtatatgtatgatttttcaatatatgtattggagtaagcctgaaagagcagtagattatgaagaaaagataaaaaaccaaaggatagagatgaatgatgaaagaagagttatgttacgtgataaagctggacgtatcactaatcaaatcatgtcctatgttcttgtaattcttatatttattgtttctatattgagtgtattttctgtaatggtaataagcaagtgggttttagttgttcttggattgcttattttatttcaatttatttgtagtgttgttgtatacaataaattagataaaaagttgtaataaaaagtttaaattcacaataaaaatattggatttttaaactttagattcttaagacagttttagaatatatctttatatacaattatataaatttataaaaagccataagtatacattgtattttgtggctttttgtggttaaagattatagatactttaaataaaaatactgcagtactttatttgaaagtaatttttatataaattcatattaatagtcttggatggtttcttttattaaaggttgcagtagataaagaattaattaagattgcatatcatataaattataaaattttttctcaaccaatttatcataaagataagtgatggtataagaatttttgtgattttatttttattgttaaagagatgtactaaattatcatatagattaggaattattgagaactattttttgtataaaaaggagctgattcaaattgttatgctattcccttgtcaatcatttcttgtatcattccagcaaatccaaagctattatacataaataaaactacattcgcattactgtttttaattatctcatcataggtcatatctatattttttatatatctaggatctagtatttcgagttccttaaaagtatcagccaacatccaagtcataggtgcttggtacgaatctctaaatataagggcctttttattagttaaagagcttgaatttctaatcttaagtatgtgacaatcacaacctctcatataagctccaccatagtcccattctcttttatcttttaattttgcttttatgatattttcattaatctcagtatttttagtaccattactaataaaatatttgtaatttgcatcacttatttcaacatagcttatagactcttttttcttaagtggatatcccatctttttattataactacctataaagaccttgtcatttacatatcgagtactgtatctttttaaatgactatctatttctgatttagataagccaaggtctaatttatcaagaataaacttatattcttcaaatgctcctaatgaatttccgtgatggtctgtttttaaaaagaatttttctctctctttttcggtaaaacttctataaaagtaatcatctatatctaagaaatttatgtctgttaactgcttttctaagttttctttgttaatatctatattatttttaccttctataccacttggatacaagtgcttaagcatatttgtcttatgaggaagtgaaacaaagtaaaaatctttttttctatttaacttactcaagttattaatggctttggagtaagattttatatgataatcagataataatttagcaaagttgcctaatagccatccatctttagttagataatacttttgtttaatctttttattttgactctgcataatatggacattaaaaacttctttcattgtaatataattttggttattattaaagataattaagaccatcaataatatcactgatactataggtagactatgtcttttgttcaatatgctacatctccttacttttattttgattagtttatttttaccaaagcaataaaaaataaacaataaaaagcctctattaaattttgaatttaatagaggctttttatttactactttattcctttatctatcattgaatctatcattgaatcaaacccagaactattatacataaacattacaatatctgcattactttcctcgattatctctttgtatgttttatatattgagtttatatttctagggtctgctatctctacttctttaaacatatcagcaaataaaagtgttgtaggagcctgatatgaatctctaaatattagtatttttttatctactaatgctttagggttttttatagttaatatattagttttagctcctctaatgtatgcaccaccataatcccactctttattatctctttcagttgcataaacttctttttcttctttttcttctttttcttctccatttatatcaaagctataatcttggttatcttttgtcatataaactacatattcattttctttaattagcatatctatattttgattataacttcctataaatttcttatcagtaattatagactttttatagctactaaaatgcttgtctaaatcttgcttagatagacctaagtccatatttgatgccatcattttaaagccttcaaatgctccatatccagtccaatgatggtcagttttaaaatataaattttctctttctttatctgaatagttacttaaaaaatactcatccatatctatatatttaattaaatctggatttaatctatttttaaaattctttaaatttatgtctatattatccatattatcaacatatttaggatacaaatgttttaacatattagttttatgtggcatcattgtaaaatacacattttttcccatatctttacttagattagataaataattaatggatttttcgtatcgacttaattgtttttggtctaaaatttctggaaacatacctaatatccagttatcttttcctagataatagttacctaccttagttttatttaaattagcctgagtccttgtatttattgatatcatttcatctctaaatgcaaaatggtcattaaaatattcttcaaacttggctataaagtcacatttttttaaattttctacagtcggaaattttgcaagatttctattttcagttatacttaattttttctttggaagtgtgaagtttagtatgaaaaatccaaatactataattaaaaatgaaatggcaacaatccttggtttttttttactcatgtttatacctcccaattagaatctaaaatataagaatggattataggttgagctacttaacattattattacaataaacatacaagaaacaatgaaaaccacattagtaacttgatataatgtgctatttaatgtatttttatttttcttaattaataatgattttacaacttttacaataggagttgatagaaggattgccccaacaattatataccaatattcaattataaatacattgaatgcatcactgataaccggataatttccagcaccaaacataatacctataaatttaatagctgctggtaaatcatcaactctaaaaaatacccatccaatcatgactataagaagtagatatatgtgtcttacaattcttggcatcttatatagaaatttttctaagaatgctttttctactgatattaatattccataatatagaccccatataataaaagtccaactagctccatgccacatcccggttaaaaaccatactacaaatagatttctatatagttttgccttagagactctacttccacctaatgggaagtacacatagtctttaaaccaagtacctaaagatatatgccatcttctccaaaactcagatactgtttgagagatatatggatagttgaaattttctaaaaactcaaatccaaacatcttacctaaaccaatggccatatcactatagccactaaagtcatagaatatttgaagtgtatagcaaactatacctagccatacctcaagtcttgataaatctccagctgacttattaaatacaccatctgcgattacacctaattgatttgctagaattactttttttccaagaccaacaacaaatctgtttacaccttgagtaaatttgtcccaattgtgttctctatactcaatgctatctgcaacagtctgatatctaacaataggacctgctacaagctgagggaataaacttatgtataatgctaaattagctaattttctttgaactttagcatcatttctatatacatctattacatagctcattatttggaatgtgaaaaatgagatacctaaaggtaatttaacctcaggtatagttatatctgtattgaataaaaaattaatattatctataaaaaaattgctatacttaaatacagcaagaatagatatattgtaaataacagaaagcacaacccacatttttttatttttactgccagaaactttaataccaaatatatagtttactattattgatagtatcatcaaaaaaatatattttggttctccccatgcgtagaatgcaatacttgctagaagtaacataacatttttatacttaggatttgccaagtaatagcaaatgagtgtgactggaaagaataaaaataaaaatattaaactactgaatatcatattagactcctttcttaaccaaatcaattatatctttatctaaaatatatagcaaagtaagtattttcaagttttaagtacttaattgtatgaatttatatgtgtttttacaagtttaattaatctatatgtaaattttgacttttcatataatttttttaaaatgatgtaatattaaaatgaattaataaagctattataataaagaaaaatcaaggacatattacttaactatatgtgtttacctttgattgtgcctctatacagtctattaagatagatgttgtttatatctataactgtaaaaagaactctttattaagtattagaatcagaatactttcagatatgcttttatcgcaagtttgttttaaatgacaaatactttaaaataatatcgaatcattatactaaataattatgattgattataaattttattttaattattgcttccatagtttccatttgttgtaaaaaagttactatttgttgaaattggtatattttttagatattatctatgtctaataattaaatttataaatatttctttattttttatattaggatatttttgagaaatgaaatacatcttaatttactttggtatgaatatttttatggatattttatcacaaaaaaataacccttttacaactaagggttactttttttctttattttttcttattatatcattattttttgtttatttcaatattttgatattttatccattatagtgaaaatatatcttgagcttttcagattttataaactttacaaaatatacttaaaattaacacattttatttacattgtattacacttaattcttatttttatcattccacaaataaaaaagaataagataataaataaaatacttatcaccttattctttatttaattattttacaatgaaaaatctaaactactttttaaatagcttcctcttccattaatttatttgtatattactgatttaactcttcaagtaactaattgattgttgcaacactttatcctaaactctagaaactttataaactacatctctagcatttggtaaatttccatctggaacacctacagcaataccaaatggtacagaataaccttctagtatatcaagtagttctctgtattttttatttgtatcaaaatttttagagattgggaaaaaatcaatatgataagaagtatggatttattaagtgaatacataaaaaatcctactttgtttagatatattttaggagttcaagaagttatgactatggtatttatacttatacaaggctagaaataaagatgaaagaatattacaataaaaaaactctttagtatatactaaagagttttttttattggtgccgctgatgggactcgaacccatatggtttcccgtacgattttgagtcgtatgcgtatgccagttccgccacagcggcttatattttaaatccaaactacttgtatatcctaccagattttccaagaatatgcaagaggaatattgaatacaaaatactcatcaaactgtaaaacattataaaaacttatgaatcaacacagttgattttgaatccattgtatttaccaattcaaccattcgggcatgtcatgtatattattatagcaaaaaaatatattgtttgcaacatatttaattttaatatactattattattatgggaatattaaataacactatattggtatataatatatatgttacaaaaatagataatttttaggagtgatataatttggaaaaaaaattaattataatagatggaaattcaataataaacagagccttttatgctctgccagaaatgaataataaagaagggttaaagaccaatgcaatatatggatttacaacaatgctatttaaaatgatagatatatataaaccaacacatataagtgtagcctttgacagaaaagcacctacatttagacatttagaatataaagagtataaggctggaagaaagggaatgccagatgaactggcagaacaattacagccattaaaagaccttttagataaattcaaaataaatagattggaaatagatgggtatgaggcagacgacattataggaactgtttctaaaaaagcagaaaataatgggtataaggtatacatagtaactggagacaaagatgctattcaacttgcttcagataatacaactactcttataacaaaaaaaggagttggagaagttgaagaatacaactttaattctgtaattgaaaaatacgagatgactccagcacaatttattgatttaaaaggtcttatgggagataagtcagataatatacctggagtacctggaatcggtgaaaaaacaggtataaagcttataaaagagttttctagtatagagaatttaatagagaatacagataagcttaaaggtagtgtaaaaaagaaaatagaggaaaataaagaaatagctattcaaagtaaaagacttgcaacaattataagagatgtgccaatagaagtggatttagatagtatggtttttggcgattatgataaagatgaacttttagataaatttagatactttggatttacaagtctcttatcaagattagttgatttggtcgattcagatgacacagaacacgtagaagaaaaaatagaaatattaaaattaaaagatacagaaaaatttatagatgaagtaaacaaaaaaggacaagttattttaaaaactgttagaggacaaggtaatatacttgaaaaaaatataatatatatttttataagtgtagatggagaaaaaatatattatgtagattcaaatgaagtgtcaaagttagatagtatattttcaaataatgaaattaaaaagtatggatataatttaaaagatgattatatatctttaaaaccatataatataaacttagaaaatatgtattttgatataacaatagctgagtacttaatagattcaacttcatctacctcatatgattgtagtgcaatagctatgaagtatttatcaaaaaaggttaaatcaaaagaagaattattaggaaagggtgttaaatctaaaaactatgaggatttagaatttgaggatttagcagagtatatgggtcaaataatatgcacagttaaagaaacaattcctatgatggaaagaagtctaatggatatgagtatggatggtcttttttatcatgtagagatgcctttagtagaagtcttaggtcatatggagtatgaaggtataaaagtagacaaaagtatattggatgaattgagtgtagagtttaaagaaataatagctacactagaaaaggaaatttatgaattatcaggagagccattcaatataaattcaccaaaacaattgggtgttatattatttgaaaaattagagcttccaataattaaaaaaactaaaactggatattcaactaatgcagatgttttagaaaaattaagagataagcatccaataatagataagataactgagtatagacaaatagtaaagttaaattctacttacgttgaaggacttttaaatataataaatccagaaagtaatagaatacattcatcatttaatcaaactataacgactacaggaagaatttcatctacagaaccaaatcttcaaaatatacctataaaaatggaaatgggtagaaaaataagaaaagtgtttattgcagatgataactgtaagttggttgatgccgattactcacaagtagagctaagagttcttgcacatatgagtcaggatgaaaatatgatagaagcatttaaacatcatgaagatattcataccaaaacagcttcacaagtttttaatgttcctatggaagatgttactagtgaattgagaggtgcagctaaagctgtaaactttggtattatatatggtaaaagtgactttggtctagctgatgatttaaatatacctgttccaaaggcgaaagaatatatcgaaagttattttgctaaataccataaaataaaagagtttatggacacaacagtagaaaaggctagtgaggatggatatgctgtaacaattttaaacagaagaagatatataccagaaataaagtcaagcaattttatggaaagaaatagaggaaagagatttgcaatgaatgcaccaatacaaggaagtgcagcagatataataaaaattgctatgataaatgttcataaaaaattggaagagaacaatttgaaatcaaaacttatactacaagttcacgacgagttgatagttgaagcaattgatgatgaaatagatatagttaagaaaatagtaaaagaagaaatggaaaatgctgtaaatatggatgttcacttagatgtagatttaaatgtaggtagttcttggtatgagacaaagtaggtgattttatgttgatattaggacttacaggaggaataggctgtggaaaaagcagcctatcaaatatatttagaaatcttaatatttctatagtggatgctgatattatatccaggaagatatttgaggataagttgttattggaaaaagtatttgtccattttgggcaaagtataaaaaatgatgatggaactctaaatagaaaagctcttgggaaaatagtttttagcgatgaagaaaaacttaaggaattaaatagcttgactcatccgcgaataagagaaaaaataataagtgaaatagaagaattgagaaaaaaaggcgaaaatatagtagtattagatgcagcaatattggtagaaagtggttttttagatatggttgacaagctattagtagttacttgcaaacaagaagtacaaattagtagaatacaaaagagagataattgtagtaagcaggaagcacttagtaggataaattcacagatgagtcaggaagaaaaatccaaatatggtgattatataatagataattcgggaacaataactgaattagaaagtaaagcacataaatttattgagtacatgaaggagaattggcgtgaatagtaagaaagtattgattctatctatttttataatcttatttggggcactattaatggaaagcaaagtaatacataaatttttatatcctaaaaaatattcagagtatgtagaaaagtattcaaaagaatttaatttagatgaaaatatagtttacagtgttattaaagccgaaagtaagtttaatagttctgctgtttcaaaaaaggaagcaaaaggattaatgcaaatattagatataactagagattggggagcagaggaactaaatttaaaaaatgtggatattttcgacccagagactaatataagacttggctgttggtatttaagtaagttatacaaagaatttggtaaattagatttagtgatagctgcatataatggtggttcaggtaatgtgaaaaaatggttagaaaataatgaatatagtaaagatggcgaaaatctacatgatataccttttaagcaaacttcaaaatatgtagaaaaagtaaaaaataattacgaacattataataagatatatggcaagaaaggaaaaaactaatgaagagaataaaagtcttaacagtcgttttagctataactcttatggtagctggttgtagtaatactaaaacaaaacaaagtagtagtgattcaagtttacaaagtcaaagttctatagatgctaagtatataaacttaacaatggtaactccaaaaactataaatcctataactaatactgataagtctgttggttatataatgaatttagtttatgatagtttatttactatagatgagaactacaatgtaattcctcaattagttaaggagtataatatagctcaggatggaatgagtatagatataaagctaaaagatgcaaagtggcatgatggaaaaaatgttacttcaaatgatgtaaactatactattggtttaattcaaaaaagtgcagatagtccatataatgaatttactaaaaatatagcttctgtgaatattaaatcagataaagattttacaataaaatttaaagctagatatgctttttcaattgatagtttaatttttccaatcgtatctcaaaatcatttagattcaaaggatgtaaatgacaagaataataatatgataggaaatgggaaatataaaatagaatcatatacagaaagagaaggaatggttttatctgtaaacaaagattactatgaagaagttccaaagaccatgaagaacataaaagtaggtatggtgcctaatgaagaggcaaggacatctatggttatggctcttgatagtgatataaccaatgttacattaaatgatttaagcaagtttcaagaaaaagagtttaatataacaaaatatcaaggaagagattatgagtgtgtattatttaattataataatccattttttaaagatgttaattttagaaaagcaattgctcactctatagataaagatagaattattagtgaaggttatatggatgatgctactccagttaattttccacttaattcaaaatcaaaatactataatagtgaaatgaaggatttagagtttaataaagataaggcgatagagtgtcttgctaaggtagaatatgcaaatataaactcagtaaatcaaaatgacaataaagtaaaaaatcagaaaaaatcagctaaaaagaactcaaagaagcttacgccagaagaagaagcaaaagctaaaaaagcagaagaagatagaatcaaaaaagaagctgaaaagaaaaaaaatagagaaaaagaggaagtaaagaaaagtctttctgaaatgaacttaaagataatagtaaacagagataatagtgagagaataaaaactgcaaacataataaatgaaaacttaaaagctataggaataaatagtacagtaaatcagctgtcagataaggatatggaaaatgctcttaattctaaaaattatgatttagcattagttggatggaaactatcaattataccagatgcaagtagtattatagcaagtagtggatatactgatgataagctaaatggatatatgtctgcacttacaagttctacgtctgaaattgaaacaaaaaaagcatacaaagatgtacagacatatataaaagataatgcaacatttataagtttagctgtgagaaacaactatattgtaagtaatagtagattaaaaggtaaaattactccaaatgattttgatgtatatgagggaatatctaatttagatataaaatcgaatgaatcaaattaaatgattaatttctatttaaaaagtataaactatatgatagaatacccttatggggtataaggaggtaattaaatgaagaagaaactattagtagaaggtatgagttgtggtcattgtgtaaaccatcttaaaactgcattaacagaagatatagatggtattgaagttttagatgtggatttagaaaataagtgtgcatctgtagatatgaaagatgatatatctattgaaaaattaaaagaagtgatagcagaattaggatttgaactaaagggaattgaatagaaattgataaactaaaaaaaggcctctattgggggagtaatagaggtctaaaaatgggggagattgagtatgtttgattttacattactattatctccccttttaaattaatatatacataaaaagtaaaaaaattttgtaatgactcacatttcttgagctttttgaatatactataaatagctaagggagggagtatcatggaatctaggggatataaagaggatttaaaaaaaatgatacttgatatggcccacaaagaacttgagagttatgtatcacaaaaaggagcaaaaaaatactttgaaggtaacttggataagattattaataataatataaaaaaattcaatcaaagtattggtcttaatagagtatatttaaaaatgttaaaaaagtgtgcatatcaagaaagtgtaacttcaatatcaaggactataaagaaagaagcattatttaaatcaaaaaaagagctatttgctttttcagagtacttaaaacttgatattaacaagcgactttcatataatcaaattttaagaaaaatatcaagatatatatactataatagaagttcatatgctcaaaaatacgttgttttcaaaagaggagatgaagaatatcttttagaaccagagaaaataaaagatgaattaatatcaagctataggtcaaagactagagaagatatgaggtcaatagcaaaacttttggatatagaagtagaagatgattataatgctgaagatattagaaaaaaagtaataaattatattatcaaagaaaaacttaaaagttagagttttaaagaataagttctgccaatttgcatgattaagtataacttgggtataaattttttgtgcatttgaaagagcttattctttttttgacatattcttttaaataatttaccaccatttggtaattggtcatcatcattcaaatttttaacttaatatgatttaaataaatttataataatgatataatataaaaaaaataaaaattggagagtgatttcaaaatgaagtttaatttttgccataacaatttcaatgttactaacttagaaaaaagtttagatttttataaaaaagctttagggcttaaagaggtaaagcgtaaggaagcagaagatggaagttttatattagtttatttaggagatggtattactagtcatacattagaattaacttggcttagagattgggacagaccatataatttaggagacaatgaatttcatctggctttagaagttgaggagtttgatgaggcaaaaaaacttcataaagatttagattgcatatgttttgaaaatgaaagtatgggaatttattttatagcggacccagataattattggattgaaatacttcctaaaaatcattaattttaaggatatgtttataatttctttacaattaataagagaataagttatcattaaattgtagggactaaaaatggataataatgttatgaatttatgactataaaaatttgttggggggagtgatagtagtgaagaaagctatagcagctttaggaattggggcagtagcagtatctgttagctccataaatgcaagtgctcttgaaaagggaacagtaacagcaagtgccttgaatataagaagtggaccaagttctgattgtgataaggtagcaaaattatacaagggaaaaactgtagagattttagaaaagtctaatggatggtataaagtaagggtatcgagttctgttgttggatggggaagcgcaaaatacatatcaacaagtggttcatctgaaggtacatcaaatcaaaataatccaacttcaagtgggacaactattagtggaaatggtaaagtaaatgtgagttctagactgaatgtaagaagtggtgcaggtactaactattcattagttggtaaagcaaataatggagatgtagtaaagttactagaacaaagcaatggatggtataaaataaaactatcaaatggagttactggatgggctagtagccaatatatctctaaaacatcagaggatgttggaacgaataattctagtaattcaaatagtactaataattctgataaaaaaccatctagcgaagaatcaattgaaggcaagaatggtaaggtaacatctgctgtgagtttaaatgtaagaagtggtcctgggacaagctattctataataggaaaattaaatggtggagatgttgttgaattaaaatccaaaaataatggttggtataaggtaaagttatcgagtggaacaattggatgggtgagtgccagttatatttctgagactaatgaaggtacaaaagaaaaaccaaattcatcatctaaccaaaattctcaatctaatagtaactcaaagccatcatttactggaaattcagataaatctacagcaaaaggttcaacaatcgtagattttgcatatactcttattggaataccatatcaatggggagcttcaggacctgataaatttgactgttctggatttacacagtatgtttttaaacattctgtaggcgtttctattcctagagtttctagagaacaggctaattttggaagtgcaatttctatggggaattatgcaccaggagatttagtttattttgacactgatggtgatggaacaactaatcatgtaggtatatatgtaggaaatagtaaatttatccattgtagtggtactcagactaatcctaataaggttaaagtggataatttaactagttcatattggtctaaagtattacttggtgcaagaagatttgtttagtaagtacaatttcttattaaaaaattagaagaaataattatttatattcataaattgtgactcttaaaaatatactttattaataatataattttgggagggacaaactaatgaatagaagaaaaacgatatacagaggatttaataataatagacataagattgatttacgtaaatatgttataacgattgcttgcttgtgtctaattggctattattcttatacaaaaataaaagatagcaagatattggagtatgtatcggctaaaataccatttctaaataattcatcagatataacttataaagatatatctgatgaattaaattcaataaaaaaagggaaaaaatctaaatcacaaaccaattcagatgataaacaagaaactaatccagaaaaagcggtaaataacactaaagagccagaagaagtcaaattagctactatagaaggctgggatatgtacactattcaagttgctgcaatagataataatgatgatttgaaaaaaatacagacatcattagttaataatgacatacctttttcagttatggagaaggatggagtaaaaaaaatacagacctattcctcttttgatgaaaatgatgttagaaagcagataagcagtgtaagaaaggtgtttccagatgcatttttatcacacttagatgcacctatgttgtctttagagtatacaagtaactacgcttatatagagagtatatctaaagaattaaataaattaataacaaactttaaagaagaatcaagtttttggtcgaatgctgaaaataatgtagatatggaaaaatataatactattttgacaaatagaaaggcaatatcacaaaatatatcaaaagaagctgaaaagattgactattctgaaatgcgtttatttaaagataatttaatagagtatgtaaagaatgtgaatgaaaaaattgatacagcttcaaaagcagcaaatgaagaaaaatatagtgtaagtaaaagtctgcttttatcatccatgcaggagtactctatgtttataaattctataaaataaaatacagaaaatttggactttagaaagctatatgaaaaggattgtttaattaagcaatccttttcctcagtttgacttaatatagaggtattgatttataaaataaattataaaaatacggatatttttttaacaattgttaagattttttaatatatatagtatacttatagaaggcagaaaaaatgtttttttatagataagggggtaaaacaatgaaactcttaacttttaagggagggatacatcctccatatagaaaagagtactctaacacaaaggcacttgaaaaagctcaagctccaaagatagtttacattcctcttcagcaacatataggggcaccagctaaacctattgttgaagttggtgatgaagtaaagtttgggcaaaaaataggtgaacaacaaggttttgtttcatgtaacgttcattcttcagtatcaggtaaagttattgctattgaacaacatgaagtaccaggaggttcagctcaatgtgtagttatcgaaaatgactttaaggaagaattacatgagagtgttcaaccaaaaggtcagttagaggatttgagcaaagaagatatagtaggtatcataaaagaggcaggaatagtaggtatgggtggagctacattccctaaccatgtaaaagtatctcctccaccagatagcaaggcagaagtagttatattaaatggtgcagaatgtgaaccatacttaactgcagaccacagattaatggttgaaaatccagaagatgttgtgtttggtttaagagcattaatgaaggtattagatgtcaaaaaaggatttataggaattgaaacgaataaaccagatgctatagaagcaattcaaaatgtagctaaagactatagtgaaatcgaagttgttggccttcaagtgaaatatccacaaggagcagagaaacaacttatttatgcgtgtacaggcaaagaagttccatctggtggattaccaatagcagcaggtgcagttgttgacaatgttgccacagcagcacaaatagctaagtctattaaaacaggtatgcctttggttgaaagaatcactacaataacaggtagttgcatcaaagagccaaagaacctaataacaaaagttggaacattagtttcagaaataatagaacaatgtggtggatttaaagaagataagaagattggtaaggttataatgggtggacctatgatgggaatagctcaatatactactgaaatagcgactaacaaaggttcttcaggaattttatgcttggatgaggaagaatcacgtactccagatattcaaaactgtttaagatgtggaagatgtacagatgtatgtccatcattcttacaaccacttttcataagtgcatattctttaaaagatgactatgacacagctgaatatcatagagcaatggattgtatagaatgtgggtcttgttcatttatttgtccagcaagaagaccattacttcaatctataagatcagcaaagagagaaataggagcaaagagaagaaagcaagctgctcagaaataaagaaagttaagggggaaaaacgatggaaaataagttgatagtatcatcttctcctcatgtgagaagtaatgaagatacttcatatataatgaaacaagttattatagcactccttccagcagcagtagcaggagtatacttctttagacttaatgctttgagtgctatgtttttttgtatacttggtacagtaggtactgaatttttatatcaaaaatttacgaagcaaaaaagtactataggagatttttcagctgttgtaacaggattattattagcatttaacgtaccagcatcacttccttggtggatgtgtctagtaggaggaatatttgcaatattagtagttaaaatggtatttggtggaattggatgtaactttgtcaatccagcacttgctgcaagagcatttttattagcatcattcccagtagcaatgactgcttggactcaaccaggtgttaactggataggtaaaaatttagatgcagttactacagcaactccattaagctttttgaaaaatggagcagcaggactggcagacctttctagcaatggaattagtcttgctgacatgatgatagggaatattggtggatgtataggtgagacatcagcaatattattattattaggtggagtatacctaatgtataaaggcataataaattatgttataccagtattttacatagcaactgtatttatattaacattccttttaggtggatttaatataactttcgcaatatatcaactgtttgctggaggacttatgttaggtggattcttcatgcttacggattatacaacttcgcctatgactaaaaaaggtcaaataatatacgctgtattagctggtcttataacaactgttataagaatgtatggtggatatccagaaggtgtatcttactcaatactattagtgaactgtcttgctccacttatagataagtttgttagaaatagagtatttggggaggtggctaaataatgaacagtatggtgagattaggtggtactttacttgctataagtgcaatagctgcattagctcttggagctactaatcaggttacagctccagtaatagaacaaagaaatatacaagaaaataatgaacttagaaaagcagtccttccagaagcaaaagaatttaaagaaatggataaaagtacatataaagaccttggagatggtcttatagctgaagtgtatgaaggtttagatggttctgaagtggttggatatactttaaaagctaaaccaagtggatatggtggagaaattgaagttatggtaggtatatcatctgaaggtcaagttacaggtgttgacattggtaatatgtcagaaacagcaggtcttggagcaaaagctaaggatgatgcatttaagggtcaatacaaaggaaaaactgctgagcctcttgaagtagcaaaaggaagtacaacagcagataatcaaatattagcaatatcaggtgcaactattacatctacagcagttactacaggagtaaatgctgctatagatgttttcaatagtgctcttaataaataaggagggttaattatgaatttagctaaagtatttaaaaatgggctaatagatgagaacccaacatttgttcaagttataggtatgtgtccaacactagccgttacaacttcagcaataaatggaattggtatgggtctttcaacagcagcagttttaatatgtgcaaatttagttatatctttaataagaaaaattacaccagataagataagaatacctatatttatagtagttatagctacatttgttacaatagtaggtatgcttttaaaagcatatgttcctgctcttgataaggctcttggtatatatataccattaatagttgttaactgtttaatattagctcgtgcagaaagttttgctttcaaaacaggagctatgccttcaatagttgatggtgtaggtcaaggtcttggatttactgttgcacttacaataataggtgcagtaagagaattacttggaaatggtagtttatttggaatgacattatttggagcatctttccaaccagtattaatatttatattaccaccaggtgcattcttaacattaggattcttatttgcaggatttaataaattaagaagtaaaaaagcatagtggaggtgtaataaatgaatttaatacttttatttttaagtatcgttcttgttaataacgttataacatctcaattcttgggtatatgtcctttcttgggagtttctaagaaggttgatacagcagtagggatgggagttgcggttacgttcgttttaactctagcttcaattataacttattttatacagattttattagtaaaaactggaactggattcttacaaacaatagcttttatattggttatagcttctatagttcagttcgttgaaatggtaattcaaaagatgagtccatctttatatcaagcattaggagtttatttacctcttataactacaaactgtgcagttcttggtatagctctagttaatgttcaaaaaagttataatttagtagaaacaataataaatggatttggagccggagctggatttactttagcaatagtaatattcgcaggtataagagaaagactagagttagctgatataccagaagcatttaaaggtttccctataacgcttatatcagcaggtttaatgtcaatagctttcttaggatttacaggacttataaagctataaaaaagaggggtgaaaatggtgatacttacagctgtattagttttaggaattatgggcttaatcttcgggatagtactagatttcgcatctaaaaagtttgctgtagaagtagacgagagagtggaagctatactaggagtacttccaggagccaactgtggaggttgtggatttccaggttgtggaggtcttgcaaatgcgatagttgaaggcaatgcaccagttaatggttgccctgtaggtggagcagatgttggtgcaaaagttggagaaataatgggaataagtgctgaagcaggtgagaaacaagtagcaaaagttatttgtaaaggaacttgttcaagtgcaaaagataaatatgagtatgaaggaatatcagattgtagagcagcaaatgttttaaactcaggtgctaagatgtgtaaatttggatgtttaggtcttggaacatgtaaggatgcttgtaaatttgatgctatttctatagttgatggaatagcagtaatagatgaagaaaagtgtgtaaattgtggaaaatgtaaagaagtttgtcctaagggtataataatcacaaaaccagaaagtcaagaagtagttgtagagtgtaatagcaaagagtttggtaaagctgttaaggaaaaatgtactgctggatgtattggctgtggaatgtgtgtaaaagcttgtaaatttgatgcaataatatttgaagacaaaatagctaagatagaccctaataagtgtgtagggtgtatgcaatgtgtagcaaaatgccctacaaaagtaatatcaggtgacataactaagaaaaagaaagttactattgaccaagaactttgtgttggatgtacagtgtgcaaaaaacaatgtaagtttgatgcaatagagggagaattaaaagaaaaacataaggtagatgcagataaatgtgtaggatgccatttatgtatggaaaaatgtccaaagaaagctattaaaattttgtaatatggacaaaataaggatatggaataatttccatatctctaatgagtacataaaacagaggtatggaataatttccatacctctattttatgtatatttattctaatggtaataaatataacaatagtgtaacaaaaaaggttcgacatttctgttgaattttttacaatatagtgatagactaaataggtacaaattacgtacaaatgaggtgaataaatgaatataatcttggcatcagcctctccaagaaggaaagaaattctagagaatacgaatgtaagatttgatataattaaaaatgaaattgatgagattatattggaaggtgaaacaccaaaacatttagttatgagattagcttttgaaaaaagtatgtctgtagcatctgaacataatgaagatgttgttattggagctgatacagttgttgttttagacaatgctattttaggaaaaccaaaagatgagtcttgtgcaagagatatgttaaaaagactatctggaagagagcatcaagtcataacaggtattagcttaataaacttgtgcgaagataaaaaggtaattgactatgtaatcagcaatgtgaaatttaaaacgttatcagagcaggatattgaggattatctgaaaactaatgagtcatttgacaaagcaggagcctatggtatacagggttatggagctttgttagttgaagaaattagaggagattattttaatatagttggtcttccaatttcaaggttaggcgacctattaaaaaaatattttagtataaatcttttttatggagtgtgatttatctgaaaaagtcatttaattcaaccattaaggtaaaagaaatggcaccagaggaaagacccagagaaaagatgcttgccaaaggcgtaaaaagcttatcaaatgctgagttgttggctatacttttaagaactggcaacaagaataaaaatgctattgaattagccaactatataataaatagagatattcagggtattagacatttagaagatatgacaatagaggagctgtgtaatatagatggaattgggttatcaaaatcaacccaaattaaagcagctttagaactaggctctagagtagctagttttaaacctataaagtataaaataaggaatccttgggatatacagaggtattatatggatagcctaaggtatttaaaaaaagaggtttttaaagcagttcttttaaacacaaaaaatgagataatatctgatgtagatgtatctatagggactttaagctcgtcattagtccatccaagagaggtttttaaagaagctataagaagaagtgcaagtaagataatagtgatgcataatcacccctcaggaagtgtagaaccatcaagagaagataaaaatatcacatcaagacttattaaatgtggagaaataattggaatagaaataatagaccatataattattggagatggattatactttagctttaaagaaaatatgataatttgactttatatgtgataaaataataggagaatgttttaaacatgattcttaatagtaggaaggagtaaaatcatggctaaggaaaaaaagaaagaaaaaaaaggtttttttagttttaataagatgacaaaggatatgggaatagatttagggactgcaaatacattagtttacataaaaggacaaggtattgttgttagagaaccatcagttgtcgcaataagagatgatagtaaagaggtattagcagtaggtgaagaagccaaaaaaatgataggtagaacaccaggaaatatagtagctataagacctatgaaagatggagtaatagctgattttgacataactcaatcaatgattagctattttatacaaaaagcggctgataaaaaaggtgttgtaagtccaagaatagctatatgtgttccttttggagttacagaagtagaaaagagagctatagaagaggctgcaagacaagctggagctaaagatgcattccttatagaagagccaatggcagcggctataggggctggattaaaagttgaagaaccagaaggtaatatggtagttgatattggtggaggtacttcagaaatagctgtaatatccttaggaggaatcgttactgctaaatctataagaataggtggagacgaatttgacgagtctatagtggcttatgtaaaaaaagaatataatcttatgataggtgaaagaactgctgaaaatgtaaaaattaacataggttctacatttaaagatgatgaagaaataaatatgcaaataagaggtagagatttaatctcaggattacctaaaacaatagaaatatgctctacagaagttagagaagcattaaaagaacctgtaagttcaatagtagatgcaataaaatctacactagaaagaactccaccagaattagcctcagatataatggaaaacggaataatgctaacaggaggaggcgctttgcttagaggtcttgataagcttattacacaggaaactggtatgtctgtacaaatagcagaaacacctcttgattgtgttgcacttggaacaggtaaatctgttgaagaccaagaaatctttgaaaaagtattaatgatgaatactaagaattagaagttggtgatggccttgagatttgacaagaacaaaaatgagaaaaaaaggattaatgttaaagtgatagcaacgggcgtagttgctatcactttaattggaattgtgggtatatcaattggtaaattttctagtggtagtccagtaaatttaggagtagcttcagatgctattacaagtgtaggtaagggaataaatgatggattttcttttatcaaaaatggttttaaagatgtagcaaattttaaagataattctaaaaaggtaaaaaaattggaagaagaaaatgaaaaacttaaaaaagatatgatagctttaaatgccaaactagataaaacagaatcgctagaagagttaaaaaagacactgaactttgtacaagaagagtataaggcgacaagtatttcagcaagtgttgttggtaaaaatgatggaaactggtatgagagttttgtcataggtgcaggaaaaaattcaggtgtaaaaaaagaaagtatagttatgaatggtagtgggttagttggcatagtttatgaagtttccaacaattatagtaaggcaatttcactattggattctaaggcatctgtaagctttaaactagcaaaggatgccaatgctaaaggtacaattactcaaaatactactttagataataaagatagttataatagtaaaggatatttgcaaggatatatgtttgactcatcatataatgtaattcaaggagatataataacaacatcaggtcttggattcttcccagatggtataccaattggcgaagttgaaaaggtggttgatgataaagataagtcattaaaatatgtagttgtaaaaccttatgttgattttaagaatataaatgacgttgtagtcatagaaccaagaaatataggataaaggggataaaaacaatgaaaaaagttttactttgtctgttggggattgtgcttatgactatagaaaatagtataacaaattatatagatatttttggcataagctttaatttagttcttatatatgtaaccataatctctctttatttagatgaattagaaggtgggattatagcagcaataatagggcttattaaagacataaccgttggtggaatttttggtgtaaatgcattaattttgtttattattgcatatgcaattggatacatgagagatcagctatataaaggtagttatattattactttcgttttaatttttataggcagtttaattgattcaattgtcaatataggtacatctagtataatttatcaaagctacaacatatcaacactttttgtaaaaggtctactagtagcaccaatagtgaatagtttaattggtttagtaatatatcgcttatctaaaagagcagttttaaaacttaaagaagattagttggtgatttcatggaagaaaataaacaagttgatagactaaaaataattaagatagtcatgagcgtgatatttttagctattttagtaaaaataatctatatgactacatttaaatatgaatattacaatgagttagctgagaataaaacatataaaaagttggcaatagaagctccaagaggagaaataaaagatagatatggaagactgttggcaggaaataaaaacttatttactgttcaagtttcaggtaacgatattaataagaaagatgcaaataagcattcaagagcaaatgaaatatcattaaaacttataaatttgctggagagaaatggtgaagaatatgtagatgagtttcctatatatgtagaaaatggaaagtactattatacatatgacagagatattagggaatataaatcagaaaatggtattccaaatgattataatgctaaggaaagtttttattacttagtagacaaacttatatcagctggaatattatctcaagaagataaaagattggatgcgacaagattacaggcaaaactaaatgaaaatggatattatccacctattttagttagtaaatggatgttcacagcagaaagagataagagagattggttggctagttataagataaaagaaactaaactgagtgccaaagaagcgtttgaaaaagtaagaaatagtgatgcattagaaattgataaaagtttgagtgatgaagatgcaagaaaaataatggtcgtaagggatttgataaaatcaaaaggatattctcaatataatccagtaactattgctaaggatgtaggagaaactacgattgctcaaattgaagaaagtgctatggaccttgttggtgtttcaatagcagtagaaccagtaagatattatcctaatgggtcattagcttctcatatgttaggatatgtaggaaaaatgccatccactcaaatagaatcataccttcaaaaaggttatgaaactggagatatggtaggtcttgcaggagtagaaaagagtaatgaaagtagattaagaggaactgatggttataaaatggttaaagttgatgcattgggtagaatcagtaaagaaattgaatctaaaaaacctaaatcaggagatactgtgtatcttacactagataaagatttacaagaagtttcagataatgcattaaaacagataatcgaagttgcttctaaaggaggtacttttaaaagtaaatttggggacaaaccaattagtgcatatgcaggaaaagcacagtcagcagctcttatagctattgatgttaaaaatggagaagtattagcttcatcaagttatcctaattatgacccaaataaatttgcaaaaggtatttctacagaggattataaagcacttcaaccaaaaaatccaaatgacttactagcaggaagtccacttttaaacttggttacacaaggggaatttcagccaggttcttcatttaagatgctaacttcaatggcagcattagaaaatggtttggatccaaactttactataaatgaccctggggttataatgttaggtaaaaaatcttttggtgactatgtatggaaccatggtagaggaaaccatggtatgacaaacttatataaagcgatacaagagtcttgtaatatatatatggcaacaattggtacaggtaaaacatggccagatggaaaaagcattggtatagatatgaatgcaaataaaatacttgagtatgcaaaattatttgggcttgaccaaaatacagggcttcaagatgaagtagaagaaagagcaggtaaagttcctagcacagaagataaattgaaatcaacacaagctcttctaaagtcaaatttagaaagagaaatggcaaatgattttgttgatataactagagaaaaaaatcctaaagaatatgagaaaagaatcaatgagattgtaagctgggcagcagaaaagaaaactcctggtagagtcgaaacaatgaataggctaaagaaaatgaatgttaaagaagatagaatagaagaagtagcagatttagcagtattcagttattttaactttgcaaaatggagtactgcagatacatttaacttagctataggtcaaggtgaaaatgcttatacaccagctcaaatatcaagatatgtagctgctatagcaaatggaggtaatttagtagaattatctgtagttgatagagctgtttcaagtgattattcatcagttaaaattaatgaccagaagaaagtcgaaaaaataccttttaaaaatccagataacttaaaagaattaacaaaaggtatgaaattggttgcaagacaaggtacagcgaagagtgcttttgctgattttccaatagatgtagcagcaaaaactggtacagctgagaaaagtgggaaaatacctacagataacgagtatgaatatttaaaaagtcatatgtcatcttataatgtcaacctaaatgatgcgattaaactagctgataagatgaaagcagaaaaagaaaaagagctttcattagctaaggaaaaggaaataaaaaagaaattagaaaataaagatttgaaagacgaagaaagaaagaaattagaggaagaattagaagatggagtaaaagttagattagaggacactgataaggtgaattcttcatatctaagaaaagctataaaagaattaaatccaaaaataacagatgaccaaatagatagatttaaacaagattatggttcttttacatggactgttgcttttgctccagcagatgacccagaaatagctgttgtatgtgtaattcctcaaggtgattcaagtgtattctcacttttaccaactagagaagttattggaacttatatgggattagagccaactaatagtaaaaatgacaacaagacgaatgatgttaacaattcttctgacgaaaatataaatttcgagtcacaaattaatagatagcttaatctatgtataaactttagctttatatagaaaaaataaaagggtttaaagcgtatttgaagaatataaatgatatatcactctggaggttgttatgtctttaagagaaatttgtagtcaagaactagtagagttcaagggtaataaaagagggataatagtaaatataaaaagagaagctccatttgaggaaatacaggaaaaaataataaacaaattggaagcatatgttggcttttttaatggggctaaaattagtaaaattaatagtgattgtttaactgacatggagattctagaacttaaagaaggaattacttctagatttgatgtggaatttgttgaagatcaaaaaattgaagaaaatagtaattttccaacaaaatatgtcaataccctaagatctggtgaaaatattgaatttgaaggtgatgtagttatattgaatgatatgaaacctggttcaaaagtcctttcaaaatcaaatacagttgttatgggagatataaatgctggtgctaaggttgtagcaggaggtaatgtttttgtaatgggtaaaatagaaggttttgtacatgcaggtgcagaaggcaatgaatttgcatatgttgttgctggaaatcttaatcctaaaatattacaaatagcagataatattgcagaagctccagatgatgaagaaaattatgaaaatgaatcagaaattagcccagaaatagcctttgtaagtaatggaagaattgtaatcgaaagctatttgtcaaagttagacaaatagaaagaaaaatagggggtagtattatgagcgaagttatagttataacatctggtaaaggtggggttggaaaaactactaccgcagcaaacttaggaactgcgctaagcctagaaaataaaaaaacagtagttgtggatgcagatattggacttagaaacttagatgtagtaatgggtcttgaaaatcgaatagtttatgacatagtagatgtagttgaaggaacttgtaggcttaagcaagctctaataaaagacaaaagatttgataatctatatttattaccagcagcacaaactagagataaaaatgctgtctcagttgagcagatgattgatctgtgtgagaaactaaaagaatctttcgagtatataataatagactgtccagcaggtattgagcaaggctttaaaaatgcagtagctggggcagatagagctattgtagttactaatccagaaatatcagcagtaagagatgctgatagaataataggtctattagaagcaaatgaaataaaagagataagattagttataaatagaattagaaatgatatggttaagcgtggagacatgatggataaacaagatataatagaaatattagcaatagatttgttaggtcttgttcctgatgatgaaagcataattatatcaacaaataaaggagagccagctatacttgattctaagtcacttgctggtcaagcatacaaaaatatcgcaaaaaggatactaaatgaagaagttcctctacttgatcttgaagttgaagatggattctttggtagacttaaaaaaatgtttagcatggctaagtagcaaaggaggatacatctgtgttagatttatttagagttttttctaacgaggctaaaactagtaaatctgttgctaaagagaggttaaagctagttttagttcatgatagagtagattgttcaccacaacttttagagatgataaaaacagacattttaaaagtaatagctaattatgcagaaatagaagatgatggtcttgaaataaaaatgtctaaatgcagaggtgagcatgatgacaaacctgtatctgcattagttgctaatataccactaaagaatataaaagatagatgtatgtaattagtgcttaaaagggggatatccttattggtatatgccccttttatttaattatatgtttaaagatagaaagacggtgattctttgaaaaaaatcaatattaattataagtcgacaattaagttgataaaacagttagactggaaacttatagttacagtattagctatctttatttttgggcttgttatacttagtagtgcaacacatgctaattcaacaggttcatataatcaattgattaaacaaggattagcttttgtacttggtataggaatgattatagtcatattattttttgactataatcttctaggcaggtattataaagcgctttatataataagtcttattttgttagccatagttttattacctggaattgggacagtaaaaggtggagctaggtcgtggattaacttaggaccacttgacttgcagacatctgaaatagtcaaattaacatttgtactaagttatgcaaagatacttgaatccaaaaaggataaattaaatacgttaaaggaagttatgcctgttgtagtttattctcttccatttatcggattattgattgcacaaccagacttgggaacaggaattgtattttgttgtatgatatttgcaatgctgttcacagcaggtcttagctcaaagttgataaaaagaggaataatcatactattagtgtcaatgccactgatgtatttaatgatggcagaccatcaaaaggtaagaatagaagcttttctaaatccagaagatgtaactctaaaaggaaactatcaagttatgcaatctctgattgcaattggttctgggggcgtaactggtaaaggactttacaatggaagtcaaaatcaagaagattttttacctgtacaagatagtgattttatatttgctgttgtaggtgaagaacttggtgtaataggaatggcagtgttgataatcttatttatgatattcctattaaggcttttagcaattgcaagagatgcaaaagatttttatggaaccctcatagtggttggtgttatgggaatgtttggttaccagataatccaaaatataggtatgacggttgcgttaataccagtaactggagtaacattaccttttgtaagttatggaggaagttcgttattgacatctttagcaaacttaggattagtactaaatgtgtgtatgagaagaaagaaaataaatttctaaatttaaatacatctaaacataaattgaggagattagatatatgaatatagcattagtagcacatgaccaaatgaaaaacactatggtcggattttgtataggttatgaatcaattttaaaaaagtatggactatatgcaactggaactacaggaaaaagaataatggatgaaactgaattaaatataaatagattagcatctggtcctttaggtggagaccaacaaataggttctttaatagtaacacaagaaatagatttagttatttttttaagagacccattgacatctcaggctcatgaaacagatatacaagcgttaataagactttgtgatgtttatcatgttccaatagctacaaatctagcttcagcagaaatatttataaaagctcttgatagaggagaactatcatggagagaagttagaaaaagcaaaagtcaacgtatttaaaaaatattaatattacagtctaaagaaacagatatataagtgtttaatgccctagtttttctgttgcaataaacctagtacctgtagaaatcttatgaaagatttaaatgatgaggagctaaatttgagattaaataattaggaaatagattatagatagagtagtagaatttaaactattactctattttaataatatgaaatagaattaagtctattattatatatatttaaacttataggtaatactatttcaaccaagtaaatgttgttacgacaacattaataaaacaaaaatttatttttaaaatttgataaatagctgtatattagtatttaatctataaatactaatatacagctatttattatttttaagtctattgtagaatataaaccttgtattatagagtactatgtattattatagtaaatataagtactatacattatagagtagtaggtgaaaaggcggtggtacataatgcagttaaataaagaagtgttaaaaggttatatcgatatattaattgtttctatattagaaaagaaagattgttatggatatgaaattgcaaagcaagtaagagaaagaagtgagtttgaattaaaagaaggaacaatgtatcttgcacttaaaagaatggaatctaaaaatttaattaaatcttattatagcaatgaacaaagttcaggtggaagaagaaaatattataatttaactaatgaaggtaaagattttttagaaataaagaaacaagaatggagatttattaaaaaggttatgaatcaatttttgggagaggtggattaatttatgaaactaatagatgaatatttagataaactatataaaaaatgtgacaataaaagtactatagaattaaaacaggaaatgagatgccatcttatagaatctgcaaatgaatttaaattagaaggattagatgaagaagaagcatgtaaaaaagcaattgaaagatttgatgatggtgatgaaatgcagtatgaattatgtaatataataaaagaactatctttatcattggataggcataaatcaattgtaatggggtttaaaaaagtattaggttacataagtataattgcatttttaatttctggatttatgtggtattacaataatagtttacaacataatatgtataatttaggaaaagaacttgatggagaaataaagcaattggcagaaagacatgatatgacaaatattggtgaatataagttagaacttgaaaaaatacttgataaagataagtatagtaaagtcaaagctcttagactatatgtaatagatatgaaagatggaaacactaatttaagttcttctggattgaatgctaatatggtatatgagagggaagcagattataataacataagtaattttatacagcatttaggatataatggaaaagattttttagacaagaatgggaatatagtaaatccagatattttcttagaatatttcttttattttgaatcggagatgttaattccagtagcatttgcatttggattattatgtataatagcgtattttatattaagatttaaaatttctttaataaaaaataataattaaataattcaccaaataattttaatttgtagagtaaataagatgtttcaaaataaaatttgaatcatcttattttttattgtttgttatactcttttcttttatatttctccatagtggattgtatctatacataatcacatattttgatataattataccttccaaaaaatgtattgaatatacaaattataatctgtataatgttgttaggggagaatgtatgaagtgtatacaattttaattttaaatgtattattgacaattctcctcactctcgtcattaccaataattagaaaattgacaaacctgttacagaccaacatttttgaatatattaattattatcattttattgtgatgatatcaaaaatgcaggtttgtgagttggattgtgtacgaactatataggaaatatagaacagattttccaagaaatctaaatattctatgaccacgtgaattgctatgcacacatgttgataatccatattttaaatctaaaatgaacttaattaatggtagggaattgaaagtaaaatatattataaaggagaatgctaatatgaaaaaaatcaggaaattagctactaaactattgattgcaacgatggttttaacctcatgtatgagtgtaacagtttatggtatgacagctaaagatgttactgcaaagacaccgaaaagctatgtagctggaaccaacagtatatatggtccaaagttatcacaagctcaacttaattcggtagcacaagcaacagcagactttatgaacaagaaaattacaaagaacatgaccacagatgctaagattagggttgcttataatcacattaaaaacaacacaacatatgttaactggaacgcagcagagggagccaatactgcttatacattggttactaaaaaaggtgcttgttctggaatgtgtaggagcttgaaagctttatgtgatgctatgggaattgaatgttattatgtacatagtacaacaaatgaccatcagtggaatcttattcgttttgaggatggacgtttgtatcatgtagatattgatgccaacaaatcagcaggagcagacatcatatacaagagtcttactcacccattaccatttgacaagaaagcctatccagctgttggtgaatcagtaaagacacagaatccaacgccaactgttaagaaacctacgccagctaagccttctgcgccagttggacctgggaatcacactatgatagcagatcaagaagaagcaatacttgatgaagtttatggaaataatctacgtcccaaaattgaaaggtatgagggagttccgtgtagtttaatcaactcatcaataaatacaattaagtttacaagcaaaaattcaaatttagacccatcaaggcatacagtttctgtaatagggtttatgaatacaccatatggtatggttgcattagctccagatggtgtacctgttgagtatccttttgaatatgataagccattttctttagattttactggtaaaaacctttctgcagcagaattatcaaaaaagtgtaaaaacaataatgtaattattaaaatagaaattggtgaaatagaacctaattctggaagagggcaagtaagatatgctagatatgtgaattaatataaatatacaagtatacaaatagaaaagattataaataatgtaccctcttggtgagggtgcatttatcattatattagtcattttgggaaataaaaaaggagttgaacttaaaattagattagaaaaattaattttgagacaactccattttaatttatttttaaatataaaatcatttattttaaataatattatgtgtgattaatggctatttaactaattttgcaaattctgcaccaaatgccatacactcttttaatgtctcttcactagggaagaattttttcttaagagattctacaggcattttgaatgacatagatttaagtaaagtctcagccatagttataccttcaccactccaaccaaatgaaccaaatactcctgctatcttgccttggttagccattgggtctataacagagaataaatcccacataggtttaaccatagttttgtttatagttggagaacctagtaatattacttttgacactactaatgtatcgtgcatttctgttaatgtcatatcttctaaatcatataattcagcctttgcaccttctttatcaagtccttcttttatctttttagccatctctaaagtattactataagctgataagtagaatatagaaacttgattttgattagttgtattaacagcttctgtagaccactcaacatatcttttaacagcagccattgggtctttagtaagcattggaccatgagaagtcaatatagtatcaaattctatgtttagtcctaccaccttatctacagcacttaaaacatgtttagcaaatggcttaactatacaatcatagtagtgtttagctgattttagataatcttcactattcactacctctgcatcaacacttgcaaagtgacaaccaaatgcatcacaagttaaaagagtcttgtcctcctcaatgtaagtaaacattgtatcaacccaatgtaagaatggagcagttataaatctaagatttcttttaccgatatttaaaatttcaccatcttttattacatgacagttaaaaggtctatttatttgaccatctaagtatagtttagcagctttagtacaataaacttctatattaggatttatatctaataagtattttaaactacctgcatggtctggttctgtgtgatgaattacaacatagtcaattttagctatatcagtaacctctgataaattacttaaaaactcatctttaaaatttgcctttacagtgtcaaataaaaccgttttttcgtccttgattaaataagagttgtaagttgtcccaaactcagtttccattattatgtcgaatacttttaaaccttcatctactacgccagtaaagtagatatctttttttacttcaaaaactttactcatttttaaccctcctaaaatttatcattatataagtaacatacccaattttgaggtgaatgaaacaaaagatgtcatgataagtcatgtaaaacaatagttttatgtttataatatatcatactttgtaaaaaaattgtatttcaataaaaatttaatagaaaatattcttaaatatttttagctattctattttgtgaataatatgtattttaaattcaatattttagttatatttttgatagaaaatattttatcgtgtataatactacttataaataagaataaaaataaagagcttgtttggaggaattttaataaatgaataaagtagacttgaaaaaaatcttaaaaaaagtagaaaagcctgctagatatcttggaaatgaaataaattcaattcataaagatactagtaatagtgaattgataagatatgcacattgctttccagatttatatgaagttggtatgagtcacttagggagtcatatattatatgatgtaataaataaggatgaagatgtattttgtgagagagtgtattctcctgcagttgatatggaaaatataatgagagaaaaaagtataccattatttgcattagagtcaagagagcctataacaaactttgattttgtcacttttacacttcaatatgaactttcatacactaatatcttaaatatattagatttagccaatataccaatattaaaagaagaaagaactttggaagacccatttataatggttggtggtccttgtgcttataattccgaaccattagcagattttatagatgtagtaatattaggtgaaggtgaagaggttaatttagaagtagtaaatgagtataaagaatggaagaaaaataaaacgactagagaagattttttatataaaatatctagcatagaaggagtatacataccaagtttttatgatgtcaagtacaatgaagatggtacagttcaaagtgtaactcctaatagagaagggattactaaaaatcctactaaaaggataataaaagatgttgagactgtagattatccagaaaaactaatagtaccttatatagatactgttcatgatagaatagtactagaattatttagaggatgtactagaggatgtagattctgtcaagcaggtatgatatacaggccaataagagaaaagagtgttaaaagacttaaagaaatattagataaattagttaagaatactggatatgatgaaatatcattatcatcacttagtacgagtgattatagtaagttatcagagttgactgattatttggtagatgaatatgcatctaataatattgggatttcgcttccatcccttagattagataatttttcaatggaaattgctgataaaatacaacaagtaagaaaatctggacttacttttgctccagaagcaggaactcaaagacttagagatgttataaataaaggtgttacagaagaagatttggaaaatgcaacagaaagagcttttgagatggggtggaatagtgttaagttgtattttatgattggtttaccaactgagacttatgaagatttagatggtatagctaaattagcttataaagttattgatatttatagaaaagtaaatggaggaaagctaaagagaagttttagtgttacagtgagtacttctacatttgtaccaaagccatttacacctttccaatggcatggtcaagatactacagaagaagttattaataagcagagacatttagtaaataaattaagaaataacaatataaaatacaattatcatgattcaaagactagtttgatggaagcagtagtagctagaggcgatagaagaataggaaaagttatatatgatgcatttagactaggtgctaaatttgatggatgggcagaacattttaatttagatatatggaaagaagctatggaaaagaataatctttctatagatttttatgcacatagaaatagaaactatgaagaggtatttccttgggaccatatagatgtaggtattagtaaaaaattcttaattagagaagacgaaaatgctaaaaaagaaaaaatcacttctgattgtagacataactgcaatggttgtggaataaatatacatgatataggaagggggctttgctaatatgagtaagataataagagtaaaatttaaaaaggaaggcgacatgatatatatatcacatcttgaccttcagagattgttacaaagagcgtttagaagagctgaaataaacttatcacattctcaaggatttaatcctcaccctaaaatgagttatggcaatgctttggctttagggacagaaagtcaaggtgagtatgtagatattgaaatagaagaagatgatttatcagtagaggaatttttaaataaagtatcaattcaacttccagatgggatagattttatcaaagcaaaagaaattgatagacaaacaccttctctttcttctgtgatagactatggagaatatttgtttaatatagatttgaaaagacctatgacgaaagagtttgtaaaaagaaaagtaattgactttatgaataataaagaaataatcataacaaaaaagaataaaaaaggtaagatggttgaagtagatataagacctatgataagaacctttgatgttttaaatttagaagatgaacatattactcttactgctactatagctacaggctcaaaaactaatttaaatactaatatacttataccaaagatattagagatgtttgaacttgatattgacccattagatgttgatatattgagaagagatttatatgtattagaagatggggaattagtgactcctatgtaagctcgagaggtgaagttgtgaaaaagatagttattgagtccctaatagggtcccagaaaacagcagtacttgaagatgaaagattaacagaactttttgttgaagacaatttaaataagaagactgtatccaatatatatcgtggaatcgtaaaaaaagttataccaggaatagaagcttgttttgtagatattggatttaagaaacttgcttatttacaattaaaaaagggaagtactataaaatctggtcaggatattttggttcagataaataaagaagaaataggaactaaaggcgcaaaattaaacactgagattagtatttctggaaggtatattgtctatataccttccaatgatagaactacaatatcaaataaaattactgatgaaaaagaacgatttagattaaaaaaaattactaaggcagtaaataaggaaaatctaggattaataataaggactgaggctcaaggttgcactcatgatgaaataaagaaagatatagaagagttgaaattaaagtatgaaaatattttaaaagaatataaacttggtataggtccgaaattattatataagtctttagattttgcaactaaatatgtaaaagataatgtgaatgatgatattgaatctataattaccaatagttatgataagtactctgaacttaagtctattttaagaggtatagataagacttatgttgataaactgtgtcttgaggaaaatagagatgtatttgatttatacagaatagaatctaaaatagaaaaattattaaataaaaaagtatggttaaagagtggaggttatttaataattgaaaaaacagaagctcttacggttatagatgtaaatacgggtaagtttattggaactggtaaacttgatgaaaccgtttataaaactaatcttgaagctgcaaaagaaattgtaagacagcttataattagagacatagctgggataataataatcgattttattgatatgcataaaaagaagcatcaaaaggagattttacacatcctagaagaagaatttaataaagataaaagaaaagctgaagtattaggtatgacaaaacttggtttagtagaagttgctaggcgtagagaaaaagaatccattgataagtattatttaatgtcttgtccatgttgtgatggtgaacaaacaataaaatctgtacattatatactagatagtattgaaaaagaaattatgagaataagtgaacatactgtttacaaaaacataatggtagaatttaatgattttatttttgaacaaataaaagaatattatatggatataattgataaaattggtgaaaaatataatataaagatttctttaaacgcaaatagtacattaaagcacaataaaaccaatgttattttcgataaaatagttgacaataaaatgtaaatattttataattaataattgtaatgccgcacagtaaaggtttaaatcttcaaatgaagtaccttgtactggcgagtttgaggccgaggaggtgtatttaatgtacgctatagtaaagactggtggaaagcaatataaagtttctgaaggtgatgtattattcgttgaaaaattagaagctaacgcaggtgatgttgttactttaaacgaagtattagcttgctctaaagatggagaattaaaattaggttctccagtagtagaaggagcatctgttcaagctaaagttgttgaacaaggtaaagctaagaaagttatagttttcaagtataaagcaaaaaaagattacagaagaaaacaaggacatcgtcaatcatacactaagatagttgtagaaaaaataaacgcttagttattggttaagttatgataaaagttaaatattattataatgatgatttcttgttgcaaggtttttgtttaaagggacatgctgattttgctgaaataggctatgatatagtatgtgctgcagttacatctaatgctattgcagttataaattctttagacaaattacaaaagattgaatttgaaaaagtagtaggagaagaaggtcatatagagtgtatagtcaaagatacgcatgtaaaagacgcacaattattactaaatcactttcaattagcggttaaagaaattaaacgggaatacccaaaaaatataaaaattttaaaaaagtagggggtgactccatatgttaaacatgaatttacaattattagcatctaaaaaaggggtaggttcttctaaaaatggtagagattctatatctaaaagattaggtgttaagagattcgatggtcaattagtaactgctggaagtataatagttagacaaagaggaactaaaatacatccaggaactaatgttggaaaaggtagtgatgatactttatttgcattagttgatggtactgttaaattcgaaagaaaagacaagaagagaaaaaaagttagtatatatccagtagcaatagctgagtaatatacataaaaggagtgttgaggcactcctttttcttataatactgatgaatttataatggtatttttggtaatgctaattaaaagtttttaattaagtaggtgaagaatttgtttatagataaggcaagaatatttgttaaggctggaaatggtggaaatggttcggtagcatttagaagagaaaaatacgttccagctggtggtccagacggtggagatggtggtcgtggagcaagcatcatatttgaagttgatttggggcttagaactctaatggactttaagtaccagaaaaaatatcaagctcaaaatggtggcgacggaagcaaaggaaaaagagctggtaaaaatggagaaaatttagtattaaaagtaccagcaggtacagtaataagagatgaggctacaggtcttgtattagcagatttaaaaaaagaaggagatacagctatagttgcaaaaggtggtataggtggtaaaggtaaccaacactttgcaaatgcagtaagacaagctccagcttttgcaaaatctggtacagatggagaagaaagatggataactcttgaacttaaaatgatagcagatgttggtcttttaggatttccaaatgtaggtaaatcaacatttctatcagttgtaactaaagctaaacccaaaattgcaaactatcattttacaacacttacaccaaatctaggtgttgttcaaactaagtttggagatagttttgtacttgcagatatacctggaattatagagggtgcttctgaaggcataggattaggtcatgagttcttaagacatgttgagagaacaaaggtattgatacatattgtagatatatctggattagagggaagagaccctattgaagattttgacaagataaatgatgagcttaaattgtacaatgaaaagctttcaaagaggccacaagttgtagttgcaaataaatttgatatattagaagatgagagtaagtttgagaagtttaagagtgaattagaaggcagaggatatacagtatttaaaatgtcagcagcaactcgtcaaggcatagatgaagtaatagcctatgtttctaaaatgctaaaagaagtagaagatgtggagctagtttcagaagaagaaatgtatagaccagaacttgatattggtactgaagaagagttaagtatagatattgaagatggtgtgtatgtagttacaggtaaagcacttagaagaataatgtattctgtaaattttgatgatatggaatcccttcaatatttccaaaaagctatggagagtcaaggtgtttttgataggcttagagaaatgggaatagaagatggagatgtggttaaaatttatgaattagaatttgagttttacaattaatttaaatatagattatagataatttaagtatagaattatagaggtgagaatatgttaaaaggaaaacaaagggcgtatttaagatctttagcaaatactttaaagcctactacacaaattggtaaagaaggtgttacagagagtttcttagagcaattagatggtatgttaagaactagagaattagtaaaagttactatattagaaaatgcaggtcttgatactaaagaaactgctaatgcagtatgtgaagctttaagagctgaatttgtgcaggctattggttttaaatttactatttacaagaggaatattgaagagcctaaaatactttttccaggacatgaacaggcgaaagcaaagactaaaaataataatgttacaaaaaagggtaaaccaactaaaagagctgttagataatagtttatatccttttagggaaataagttaaaaaaatagtgacaattggaagaaattgtattatactattaaacataaattttaattagcaatcttatcaagagtggcagagggactggccctgtgaagcccggcaaccagtatatttaattatacattggtgctaaatcctgcagcatttatgctgaaagatgagtataaacccgtcatatggcttgagtttatactcaagctttttttattggtatatttatatatataaataatttaatataatcaaaatgatgggggtatgttacagtgaagatagcaatattagggtatggaacagtaggaagtggattaattgatttaatagaaaataatacttcaaaaagagatatagaagttgttggaattttagttaaaaataaagaaaaacacaagtataagaagtattttgataagataactactgatatagaagatatatttgacaaggatattgatatactagttgaagtaattggaggattaaatccagcttttgattatgtaacaagagcgttaaataaaaaaatacatgtagtgacagctaataaagatttactggctgaaaaaggtagtgaccttatagaattagctaacttaaataatgttagcatcaagtttgaagcatctgtggcaggtggtattccagttttaaaaccattgatagaatcactggaaggcaacaatataaagagcataaacgctattttaaatgggacttgtaattttatattatcaaagatgtatgatgaaaatttaccatatgatgttgctttaaaacaggcacaagagttgggatttgcagaagttaatccagatgcagatgttttaggatatgatagtgctagaaagttatctatattgtctactttatcttatggaaaaatagtatattggaaagatttattattagaaggaataacttcaatagatgaaaaagatatagaatatgcaaaaaaattaaattgtaagataaaattggttgctagaagtaagtatgaatcaggagaagtaagtggatttgttagaccagcattagtggacaataataatatgctttcaaagatagataatgagttcaacgtagttattttagtaggtgattcagtaggtgaactttcttttgtaggtaagggagctggaagaggtgcaacaggaagtgctgtttatgcagatattatagatataatagataatagaagttcaaatataaagtctttttcaaaagggaaattggatttaagtggacttatagaagatgagtgtagtgcagtagttagatttggtgggtataataataaagatggaattttagaatgtttagataaatatgtagatagttatgatattatagatgatgaagaattggcgatttttgtaagtgcaaagtcagaacatgagattgatagagttttggaaattgtaaaaagaaataattacagtgaatcagctaaaaaattattgaagatagattaatatgtttatgcaagaattatgaaaatttaatagggtgtctcaaaatagagagacaagccttttttccagtattgaaataataaaaatatatttgattttataaaaaaagagtgtctcatgaactaaaaagttcattttgagacactcttttttaatatctggtgaattaataagataatagaaaaatgtatacgttataattaaccaataaagaaattttcactagcttcattaatagcttgctgagttactcttatatatcgctgtgtagtggctacagaactgtgatttaaaagttctttaaccaactctaaattattgttactcttttcaaattgagtagtagcatagagctttctaaagctatgtgtacttatattatacagatttaagtgtttacaaattatcctcaactgtttttgaatagcctttgtctttatatttactaagtagtcatttgatttaagattatactttcttgcatgttcatttatggactcaattatatttttattaactggtctatactgtaatttgcccgtctttttttcatttatttccaacatattacctttaaaattacctatctttaatcttaaaatatctgatattcttagacctaaattagcttctaacattagtgccaatgcaactttaggattttttctaaatcttttttcaacgccattttcactataagtaaagccagtatgtaatagttccattatctttttatattcgtctatttctataggtcttgttgccattttcaaccactcctcttagtttgatttggtaagtttaggtcggtatttattatataatataaatgaaacattatataatggaaaaatttcccagtaaacttatacaagtgtgatatatgtgattaaggagaattttttgaaaaatatttctaataaaattattaaattgtgatgaaataactatgctgttaaactaattaaaaaggttattaaaattatgacaaatataataaaaaaatggaagtatttagttaagttttattagttttatttttttcgtgaaaatttcttaataaaaaaagtatttttatatcgcattagtttcccatttgtagataaagttttcatatgtttttttgcaataaatactgctgagattagataaattattactacaatttgaagaattgtatcataatagctaagataataaaaccagattaaattattatatataacgttgtatgtatcagcaaagctagaaaccaacacagcagagtttgcaattggataaagtataaatataaagatagcagctaaaactccatgcgcaaatttacttagtatgtataattttaaatctatgtccgtttttgatagaaatgtacaacattgagctaggatggataatccactaaatcctatcaaaaagctagctaaagatgctcttaaaatttctggagaacttgttatactagatactttattgcatcctatagtaatttcaaatagaccacttacaaatgcttgacagagttctttactaacacctaaaaatgaaagaggcaaatatataactgatgctattaatgagattacattaaaaagagatagtattttaaatactactgaaaaaacaattacaaatccaccaactgtaagtaatgtatttactccattaaatacagcatttccaaataaaacaaaaaaaccattcccacttgaatttctaatgttgattacattttttatatttgtttttaaatccaattttgtctttggaagattttcattaccataatttctaaagaaaagaccaaccaatatagttcctagataatggcagagaatcattaaataacctaagtttgaattttggaacatacctgtaccaaccgaacctattatgaataaaggtcctgatgtagaacaaaaagacacaagtctttgtgcttcatgcttagaaatttgcccattactcctaaattcagaagctaaacttactcctactggataaccagatactgtagatatagcaaaagctaaagcgctctttcctgaaacattaaatacaaatctagttatgggattgatgataaaccctataatatccactatttttaaatcaacaattaagtttgctccaattataaatggtagtagtgatggaactaaaacattagaccatatagagaagccttctcttgcagattttatagcttcatttgggtataggataatccctaaaactagaactccaactataatagctggagcaaaaaaagcaataattttattttttttcataatatcacctgtaaatttgagttataagatattatattaaaagtaataaaaatatatgaatgtaatggtttaagatatataatagatatatattacaacaacgattatcatattggaggaaaaaatgtttaatagtatagctagtaaaaaagtttatgaacaagtaattgagcaaatacaatataaaatactaaatggagagttaaaaaagggggataaattactatcagaaagagaattgtctgaacaaatgaatgtgagtagaacttccataagggaagctattagggtattagagactatgggagtgatagaaagcagacagggtgaaggaaattttatatgtacaaatatagaaaaaactttaatagaacctttatctatgatttttaaacttaataatggcacacttgaagatatattagagcttagaataatcctagaaattgagattgcaaaacttgcttcaaagagaataacttcttctgaagttatagaattgaaacatataatagatgaaatgagagtagaaactaataaaaaagataataatcgagtactggtgttattagaccaaaaatttcacagtaaactagcaacattaagtaaaaattatttaattcaaagtctttttatgacagcatcaaaattatttgatggatttatagaagatgcaagagaaaaaataatcgcagaaccttttaatgaaaatatattgcttaaacagcatgaagctatatacaatgcagttgtagaaaatgatgtagaacttgcatgtgagaaagcaaaggaacatatggattttataagtaaaaattatagaaaaaatgaaaattaaaagtttgttataaaataaattattcttgcaaatggtagataatggtactatcatataaatgtgaaactggtatgaccacataccaattttatagtttattataatgggagattaaaaatggtaaagttaaaagtaccgtattcaaaacaaggaatgattttagaaatacctgatgaacgttttctcggtgttttggagtcaaaatcggataattatatagaacataagactcaagaagagatagttgaagaatctatgaataatcctataggctctaattctctggaagaactggttaaggggaaaaagaatgtagtcataattacaagtgaccatacaagacctgtaccaagtagaataactatgccaattatattaagaaggattaggaatgttaatccagaaattgatgtgaagattatagtggcaactggatttcataggccaagtacaagggaagagctaatttataaaatgggagaagaaatagtagataatgaagatatagttatgcatatatctactgatgataaatctatgtgtaaagtagggatattgccttcaggtggagatttatatataaacaaactagcatatgaggcagaacttttgatagcagaaggttttatagaacctcatttctttgcaggtttttcaggtggcagaaaaagcgtacttccaggaatcgcatctgcaaagactataatgtacaatcactgtagtgactttatagatagtgataattcaagaactgggaaattgaataataatcctattcatgaggatatggtatatgcagctaaagttgcaaagttagcattcatattgaatgttgtaatagataaagataaaaaaataattgcttcctttgctggtgatgtcgaaaaagcacatactaaaggatgtagatttgtaacagagttatcaaaagtaaattctataaaatctgatattgttgtaactacaaatggtggatatccactagaccaaaatatttatcaatctgttaaaggaatgacagcagctgaagctacttgtaaagacggtggagtaataataatgatttcagcatgtaatgatggtcatggaggtcaatctttttatgaaaatgtagcaaatgcagattctccaaaacaacttttagataaaattagaagtgtcgatagagtagatacgattccagaccaatgggaatttcagatactagcgagaatattatctaaatatactgtgataatggtaacagataagtgtaatcctgaaatgataaaaaaaatgcatatgaaacatgcatttaactttaaagaagctttagaaatggcgaatagtatagttggtaaggagagcaaagtagtagttatacctgatggagtatcagttatagttaaataaaaaaggagtgtactttatggaaattttgacatgtattaaacaagttcctggaacgacttcagtagaagttgatgaaactacaggagtactaaaaagagatggagtagattcaaaaatgaatccctatgacctatatgctttagaaacagctcttagaataaaggaagataagaaagcgaatctaaaagtacttagcatgggtcctcctcaggcaaagaaggtaattgaagaaagttttatgatgggagctgatgaaggagcattaataagtgataggagatttggaggagcagatgtattggctacttcctataccatatcacaaggtattaagaagatgggaaaggtagacctaataatttgtggaaaacaaactactgatggtgatacagcacaggtgggacctgaagtagctgaatttttagatatacctcatgttactaacgttacaaaattaattgaagttaaagatgaaagtatagttgttgaaatagatatgccaaatgatttacaagtatgtgagattgaatatccatgtttaataactgtagaaaaagacatttttcaaccaagactaccttcatttaaattaaaacttaatactaaagatagagaaatacctgtatatagcttagatgactttgaagataaagatgaaaataactatggacttaacggttctcctactcaagttgtaagaatatttcctccaaagccaaatacagataaaaatattgtaagaggaaatgcagatgaactaagttttgcacttgtaaataaattagaggaattaaagttggtgtaagggggagtaataaatgtcaaagatagttgtaaatcaagataaaataactgacttaaagagaattttagaaatatgtccttttggggctatagaagaaaagtcaggtatagtagaaataagtgctggctgtaagatgtgcaagttgtgtgtcaaaagtggaccaaaaggcgcatttgaatttatagagagtagtaaagtacaaattaataaagatgaatggaggggaattgcagtatatgttgaacatcataatggaaatatacatcctgtaacgtacgagcttataggtaaagctcgtgagatggcatcaaaaataaaacaacctgtgtattgtgtatttgtaggaaaagacataaaagataagtgcagtaatttgatttcttatggggtggatgaagtatttgtatatgatgaagatgaatttaaagattttaggatagaaccatattcaaaagcaatagaaaactttatagataaaataaaaccaacgatagtattagttggtggaactacattaggtaggtcattagctccaagacttgccgctagatttagaacaggtcttacagcagattgtacaatacttgatattcaatcaaatactgatttagaccaaataagaccagcatttggtggaaatataatggctcatataaacacacctaataatagaccacaatttgccactgtaagatataaaatattttcagcaccagaaaaaatagagaatactacaggaaagataactttatgtaaagtagaaaaaaaagaactaaaatctaaaattaaggtactgagtgtaaaagaaaaaaataaagaagttggtctggaagaagctgaagtgatagttgtggcaagcagagcaataaaaaaacaagaagatatggagatgatatataaattagctgataagctaaacgctcaagtggcaggaacaagacctgtaatagaagcaggttggatagatgctaaaaaacaaataggtcttagtggtagaactgtaaaacctaaattgataataacttgtggtgtatctggagcagttcaatttgttgcagggatgcagggtgctgactatatagtagcaataaataaagatgataaagcgcctatacttgatgtagcacatttagctttaataggtgatatttatgatattattcctaaattgattgaaaaaatagaaaataacaaagataataatcaaaaatatatggcatcagcagctaaatagggggatagaaatgtataaattaatcgataaaaaagatatagattttttaatagatacttgtggagaagaaaatgtattagttggaagtgatataaatgaagatttttcacatgatgaacttggagggattgagaagtaccctgaagttttagtaaatgtacttgaaactgaacaagtatctaaaataatgaaatacgcatataaaaataatataccagtcacaccaagaggtcaaggtactggtcttgtaggtgctgctgttgccataaatggtggaataatgattaatctatgtaaaatgaataaaatacttgaagttgattatgaaaatttaacattgacagtagaaccaggtgttttattgatgacaataggtcaatatgttcaagatagagatttattttacccacctgacccaggtgaaaaaagtgctacaattgcaggtaatataaacactaatgcaggtggtatgagagcagtaaaatatggcgttacaagggattatgtaagaggacttgaagttgtactaccaaatggagaaattataaatgtaggtggaaaggtggttaaaaatagttctggatatagtataaaggatttattagtaggttcagaaggtactttaggaatagttactaaagctatattaaaattgcttcctttaccaaagaaaagtataagtttgcttataccatttccagatttatcaatggcaatagaaactgttcctaaaataataaaatcaaaatcaataccaacggctatagaatttatggaaagagatgtaatattggcagcagaagaatttttaggtaaaaagtttccagataatacatcagatgcttatcttttacttacatttgatggaaatagcactgaagatatagaaaaggaatatgaaaaagtagctaatttatgtttagaaaatggtgcattagatgtatttatatcagatacacaagaaagaaacgattctatatggtcagccagaggtgcatttttagaagctataaaggcatctacgacacaaatggatgaatgtgatgtcgttgttccaagagataagatagcagagtttataagatacactcacgagcttcaagacaaattaaaaataagaataaaaagttttggtcatgcaggagatggaaatctacacatatatattttaaaagatggtatggatgataatacatggaaaataagattaaaagaaacttttgactatatgtataaaaaatctagagaacttagtggtcaagtttctggtgaacatggcataggatatgctaaaaaagagtacttacatgaatcaaattcagatgcttatatgatgttaattaaaaatataaagttagcttttgaccctaaaaatattttaaatccagggaaaatatattagaaatattaatttaataatatttacaaaacaaaaaatattaaattagatttaaatataatattttaaactttacttttaaatctgaagctaaattgtaaaatttttaggatggcaatatttacttaaatttagaaagtaacataatatttaagttgatgttgtcatcctaaaagcatgtgtacataaataaagtaagactattgtatcttatataataaagagttaataaaatgatttttataaatatagttattttaaaaaactactttacatatattggatgagtataaaaatccatagggccttttactaaatctttattgtttttataatatattgaattatatatatttgtagcttttatatcataacttatgagtgttttaaaaatcgtatcatctaatgaaaatgatatatttgaaaacttgtttattatttttatttcagatttattttttatctcttttagaatttctctacctttatcattaaaagcaagtattcttatataaggtatagtatctatgttttttataagttgcatgtcgctttttttaatacctaacaatatattgtttagagttcgtttgattttggttaaagtgtatcgcttggatttaattgctaattgtagctcatgtagaaattcagatgtaaagatatctttatagattctgttttctatgccttcatttacttcaaaatactcttttaaagtgtccatatctctaagtataattgtttttaaaatatcaaagaagaagtcatcaaacataggtaaaaaaccattatctactttttcatttaggatgttataagttttttctggaataacattttttaaatgaaaaaggtctgtattttctttaagtgaagtccttatagcagtagcagaacaaatatcactctcaatttcttcggaattatattctgattggaccctggagatagtaaatggttttatactactgtttaaatggatgaggttttttatgtattctatacccagtatgttgtttgatgaatttaatgtttttgataattgttcctttgaataattttgtataaaattattttttttgtcttgatgtatataatcaaaaagtgcattagctctagctgttggaaataacaggccatcatctaaatatttttttaaaagtaacttaaattcatttggttcatttgctaaaatttcagctatattataaagaatttctgtatttccttcttcactaccaaaacatatagaatttatgcagtttagtgaatttaaaattgttatagcaccatgagaaaaaatttcagcactttgacaagcaaataaagttggtaattctataactaagtctacaccattttcgacagcaatttttgctctagtatatttatcaaataaagctggttcgcctctttgtagaaaatttccactcattattgctacagtatgtgttgcatttgttttttctatagatttagataaatgatatatgtgtccattatgaaatgggttatattcaactattaatccaagtatgttcataaaatactccttttatctttaattattttatatatatcacaatttattataatatgtataaaatttaaatttttaattataaaattaaaaaacgtaaaaaaatttataaaaatgtagaaatgttacctacataaaaaactggttaaatgttattaaaataactttattagctctttatattatattattataacaaatgggaaagaataatctacattaagttaacttgttaatatattattagtgaaatacacaatttaccatactagaaatatgatataatataaaaaaaaagtatatacttttatattaaaaggtgatatattatttatgaaaatcgtttaatgtatacaataatatatctataacaaaataataaaagatagagttttatttagacatttattacaaatcaaaatttattacatattatttataaaaaaatctaaggaggaaataataatgaaaatattagtattaaactgtgggagttcttcattaaaatatcaattaatagatatgaataatgaagaagttttatgtataggattggttgaaagaataggaatagaaggttctatattaaaacatgaaaaagcaggtagagatgataaatacgttgttgaacaaccaatgaaggaccacaaagatgcaatagcattagttttagaagctgttgctcatccagaatttggtgcagttaaagaaatgaaagaaatagatgcagtaggacatagagttgtacatgctggagaaaaatttgcaacttcagtagtaataactccagaagtagaagaagctttaaaagaatgtatagatttagctccacttcataatccagcaaacataatgggaatagatgcttgtaaagctatacttccagatgtaccaatggtaggtgtatttgatactgctttccatcaaacaatgcctaaatcttcatacttatatggtttacctcatgagctatatactaaatatggggtaagaagatatggattccacggaacttctcataattatgtatctcagagagcagcagagatattaggaaaagatataaaagatttaaaaatagtaacttgtcacttaggaaatggtgcttctatagctgctgttgatggtggaaaatgtgtagatacatctatgggattcactccattagaaggattaataatgggaactagatgtggagatatagacccagctatattaccattcttaatgagaaaagaaggtttagatgctgatggattggataaattaatgaataaagaatctggagtatatggaatgactggaatttctagtgacttcagagatatagaagatgcagctaaaaatggagacgaaagagctcaggctacattagaagcgtatgttaaaaaagtacaaaaatatataggcgcttatgctgctgaaatgaatggattggatgttgtagtatttactgcaggcgttggtgaaaatggaaaggctataagagcagatattgcttctaacatggagtttttaggaatgaaattagataaagaagctaatgatgttagaggaaaagaaacagtaatatctactgctgattctaaagtaaaaatgcttttaataccaactaatgaagaattaatgatagctagagatacattaagattggtaaaataattaaattaaacctatgcctatcaagtaaaaatacttgacaaacaaatgctagatttgtataataaatttggtgatatgttgaggtgaacttaatgaaagttagcatagaaaaaataaatagaaaagaaactgacaaaatagacttgaatttttgtgaaaaaattgatactattagttattgtgatgagatttacaaattagtatcacctgtaaatttaaaagggaaagtgtcaaagactaataaaggtttgtatctagatatagatgtcaattttacaattgttgacacttgttcaagatgtcttaaagaagtagaaataccactagagtattctatacaaggttttttagtaaaagaagaagattatgatgaagatgagtttgaggaatttgatccttttatattcgatggtgaagaaatcgaccttattgatataatagaacagacattagattttaatgtacctcataaagttctttgtagtgaaaactgtaaaggtctttgtcaagtatgcggggcaaacttaaatgaagaagagtgttcttgcagtgaaattacaaacgatgaggaatacatagatcctcgttttgctaaattaaaagatttatttaattaaattttgactaaggaggtggcgtaaatggcagtaccaaagcgtaaaacgtctaaatcaaacacaaaaatgagaagagcagctaactcaaagatggaagcaacaggatttgtaagttgcccacaatgtcatgagccaaaattaccacatagagtgtgtccagactgtggatattataaaggtaaagaagttgtgtctaagtaatagcttctaaaaagcatgtagagtatactctacatgttttttttgtacatataaaaaaataagatgatttactagagaaaataagtggattttatgcatattaaaaaatagaaaaataataatataagtattgaaaatttttgtgtgttactatatactactattagtagctggtactaattacagctataaaatttggagggaacatgaaaaagaaaagtaaagcccaaagacaaaaagagcttatagatatgctaaagacagatcctttttatactgatgaagaattatcaagtctgtttgatgtaagtatacagaccataagattagatagaatgagtctaaacataccagagctaagagaaagagtcaaatcaatagcagaaactcagagttcaaaagtaaagactttaggagtaaaggaaattacaggagaaatcattgatttatctgtagggcgattaggtatatctatgttagaagttacacaggacatgatttactctaagactaatactttaaaagatacgtatattttttctctagcagattcattggcaatggctataatagatgcacctaaggttattatgagagttgcaaatgtaaaaagttttaagttgatagaacaacaagatagacttatagcaaaagcagaagtgtatagaaatatagataaaaagcattatgtaaaagttgttatcaacaataaagcccaagagcaaatatttagaggaaagtttatctttgaagaattagattaggagggaaattatgaaaatagtaattgatggaatgggtggagataatgcacctaaatctaatgtagaaggcgcagtaaatgctataaaagaatatcaggttgatttaataatcacaggagataaagatttacttgaaaaggaattttcaaattatgaatttgatagaaataaattagagatagttcatactactgagattatagaaaacgaagataaaccagtaaaggctataagaagtaaaaaagattcatctatggtagtagcattaaatcttgtaaaagaaggaaaggcagatgctataatatcagctggaaatacaggagccttacttgctggtggattatttgttgttggtagaataaaaggaatcgatagaccttgcttatgttcagcaataccaaatgtaaagcgaggaatgacacttatagcagactgtggcgcaaatgcagattgtaaacctaagaatctagttgaatttgcagctatgagtaatatttattcaagaaaagttttaggtcttgaaaatcctaaggtagcattagcaaatgttggactagaagaaggcaaaggcaatgatttagtcaaaaggtcatatgaagaaattaaaaaattagatttaaattttatagggaatgtagaagctagagaagttataaatgcatacacagatataatcatatgtgatggatttacaggtaatatattacttaaatctgctgaaggtgtagcactttcagttatgagtcttataaaggaaacttttatggccagtacaaaaagtaaaataggagcattacttataaaggatgatttaagaaaattaaaaagttttatagattattctgagtatgggggagctccacttttaggtctaaatggaggagttataaaagctcatggtagttctgatgctaaagctataaaaaatgctataaatcaaggaataaaattttcaaagggaaaagtcgttgaagatattaaccaatttataagcaaatacaatgaagaaaataaaaataacgaagatgaataaactcgttttggaggtttaatatataatgaatacaaaggctggaatattaggagtaggaagttatctacctgagcaatcatatgataattttcacttcgaaaaaataatggatacatcagatgagtggataagtactagaactggtattaaggaaagaagatttgccaaagagtctgaagcaacttctgacttagcatctaaagctgccttaaaagctatagaatgtgcaaagttaaacgtagaggatatagagctgattatattagctacaattactcctgatatgtctttgccttcaactgcatgtatagtacaagatgcaataggagcagtgaatgctactgcatttgatatatcagcagcttgttctggatttgtatatggagtaactattgcaaagcaatttgtggaaacaggttgctataaaaatgtgcttgtaataggagcagaaacttgttctaagtttttaaattatgatgatagaacaacagcagtattgtttggagatggagctggagcagctgttattggtcctgtaaatgagggtggaatactgtctacacatatgggctctgatggtaaaggaaaagattgtttaaaagtacctgctggaggttcaagacttaaggcaagtaaagagactgtagaagctaatctacatacaatagaaatggcaggtagtgatgtgtttaaatttgcagttagaaagatggcagaaacttctttaagagctcttgaaaaagcaaacctaaatacaactgatatagactacttagtgccacatcaagctaatataagaatcatacaagcttcttctaagagattagagcttgatatgaaaaaagtttatgtaaatatagacaaatatggaaatatgtctgctgcatctataccagtagcattagatgaagcttatagagaaggtaaaattaaaaagggtgataatgtagttttagttggctttggtggaggtctaacttggggggcttcagttgtcaagtggactttatagtataaaatatctaaaatgatttaattaacaaaattaaacttatacacaaaataaagttgattaataataaaaagtttacttttatgatttcaagtgaaggagaattgtatgaataaaatttgcaaaatattaaatataaaatacccagttatccaagggggaatggcatgggtagctactgcatcattagcaagtgctgtatctaatgcaggaggacttggcataatagcagcaggaaacgcaccaaaagaagctataaagaaagaaattgttgagtgtaaaaaattaacagataaaccttttggagtaaatgtaatgcttatgtcgccatttgttgatgatataattgatttgattatagaagaaaaagttcaagttattactactggtgctggaaatcctgcaaaatatatggatagattaaaggaagctggaacaaaggttattcctgtagtacctacaatagctttggcacaaagaatggaaaagttaggagctacagcagtaatagcagaaggtactgaaggtggaggacatataggagaacttactactatggtcttagttccacaagttgctgatgctgtaaacatacctgtaatagctgctggaggaattgtagatggtagaggaattgcagcatcatttgcattaggtgccagtgcagttcaagtaggaactagatttatttgcagtgaagagtgttctgtgcattcaaactataaaaacttagtactaaaagcaaaagatagagatgcaattgtaacaggaagaagtactggtcatccagtaagaacattaaaaaataaactatcaaaagaatttttaaagatggaacaaaatggagctactcctgaagaattggataaaaaaggtacaggagctttaagatttgcaacagtagatggagacatagaaaaaggttcatttatggcaggtcaaagtgctgctatggtaaaagaaataacaccttgtaaggaaattatagaggctatggtaaatcaagcaagagagattatgccagcaatagaactgtaaatcaggaggagcaagatgggaaaagttgcactagtattccctggtcaaggagctcaatatgtaggtatggccaaggatttatatgaaaataatgctgttgctaaaagtgtaatagatgaggctagtgatgccttaaatatggatttaaaaaaccttatgtttaatggaaatgaagaagaactttctaaaactgaaaacactcaacctgctatggttacacatagtgtagcagtattaaaagcggtacaagctcaaatagatttaaaatataatgcatgcttaggattatccttaggagagtatagtgcgttggttgcagcagatgcaattgactttaaagatgctgtatgtttagttaaaaaaagaggtaagtttatgcaggaaacagttccagcaggtgttggagctatggcagcaattttaggtttagatagaaatgtacttgaaaatgtggttaaagatatacaaggaggtattgtagaagtagcaaattacaattctcctggacaaatagttatatctggtgaaaatgaaaagatagaagaagcaatggtaaaatgcaaagaagcaggagcaaaaagggcagttaaattaaatgtaagtggaccttttcactcatcaatgttaaaagaagctggtgtaaaattggccagtgaattagaaaaagttaacataactaaacctaaagttgatgtggtggcaaatgtaaatgcagattactataaaaacgaaggtaaagacctgcttataaaacaagtaagttcatctgttctttgggaagattctatagaaatacttttaaatgatggatatgatacttttatagaaatgggacctggaaaaactttaaaagcatttattaagaagatagcttccaataaaaaagcaaatgtcaatatttataatatagatggtatagattctcttaatgaatttgtacaaaattatagaaatggagagatataatgataaatcttacaggacaagtagcagttgttactggtggctctaggggtataggaaaagaaatagcaaaaaaactagcatcttttggagctgatgtagtaatcaattatacttctaaagaagatgaagcactaaaaactaaaaatgaaatagaaagtatgggggtaaagtgtacctctataaaatgtgatgtgtctaaatttgatgaagtgaatcaaatgatagattctgttgtaagcgaatttggaaaaattgatatattggttaataatgcaggcataactaaagatggtctgcttatgagaatgaaagaagaagattttgatagagttatagatataaacttaaaaggtgtctttaattgtacaaaagcagttactaaacctatgatgaaaaagaagtatggaagaataataaatatgacttcagtagttggaattatgggtaatgcagggcaaactaattattgtgcatcaaaagcaggtgtaattggatttacaaaagcttctgcaagagagttagcatcaagaaacataaatataaatgcagtagcacctggatttatagaaacagatatgactagagtactaagtgatgatgtaaaagaatcaacactagcaaacataccaaagaaatcttatggtaaaccagaagatgtagccaatgccgtagcatttttagttagtgacatgtcaagttatataacaggacaagtaataaatgtagatggtggaatggtaatgcaataataatttaaaaagtagagaaatctattaaaataaaaaattttaggaggtacacaatgtttaataaagttgtagaaataataatagagcaattaggagtagaagataaagaaataactatggagacatcattaatgaaggatttagaagcagattcattagatgcagtagaaataataatggcacttgaagatgaatttggtatagaaataccagatacagaagcagaaaacttcaaatctataggagatatagttaagtatatagaagctaataaatagtcgagctttaaaaaagtggaggtatccgatgaataaaagagtagtaataacaggacttggatgtgttacgccgttgggaacgggaaaagaagagttctggagtaatataaaatctggagtatctggtatagataaaataactaattttgatgctagcacatatcaaactcagatagcaggagaagttaagaattttcatccagaagaatatataagtaaaaaagaattgaagagattagataaatttgctcaatttgcaatagtatctgctaaattagcagttgaagatgcaaatcttgatttagataaagttgatagagaacgttttggtgttataataggttctggaataggtggagttgaagctatagaaactcaacataaaattcttttggaaaaaggaaataaaagagtaagttcactttttgtacctatgatgataggaaatatggcagctggtcaagtttcaatatttttaggagcaaaagggcctaacactaatgtatgtacagcttgtgcatcaggaactcattcaataggtgatgcttttaaggtaattcaaagaggtgatgcagacatcatggtagcagggggctctgaagctgctgtaacaggtcttgcttttgctggattctgtaacatgaaggctatgtcaactagaaatgatgaccctaaaactgcatcaagaccgtttgataaagacagagatggttttgtaatgggagaaggagcaggtattgttatcttagaagacttagaacatgctttagcaagaggggctaaaatatatgcagaagtagttggatatggtttaactgctgatgcataccatatgacaactccagctgaaaatggagagggagcagctaggtctatgaatatggctttgaaagatggaaatgttccattagaagaagtagattatataaatgctcatggaacttcaacttattacaatgatttatatgaaactatggctataaaaactgtatttggagaaaaggcatatgacttatgtgtgtcatcaacaaaatctatgactggtcacttattaggagcatcaggtgctatagaggctgttgtttgtgctatgagtatagaagatagttttgtgcctccaactataaacatacaagaagttggtgaagatttggatttagattatgttccaaatcaaggtaaagaaaaaaatattagatatgcactatcaaattctttaggatttggtgggcataatgctacaatagtactaaaaaaatatgtataaataaatattaaatataaaactaaaaaacaagcacttgttttaactgtataaatttatattagcttaaatttaaagtctcctaaattattttaggagacttttttattaagatttaagtctagcatatgttgtaaatcattttgatatattgtattattaattattaagaggttatttatatatgcaagttttcattctacaatatacaaaaggaggactaaaattttgaattttagactaccaaagaaaaggttacccaaaaagataatttttatatgtataatacttattagtattattttgtttataaagtatgaccaaaatggattgaaagaaagagaaattataaataagggaaaatatatgtctgaaagccttgtggcagataaggagtatgatgaagcaaaaaaagtggttaagacttctttcgaatctattccagaaaaaaaatacaataaagtatataatgaagtttgggatatgttaaagactatttcatatgttccagatggaacgaagatagtcattgattctttagaaaagatgagagaatcagatgtgaaattatctgatgaatgtagatttaatatagaaaaaagattagcatcagtgtatataatggataataattattctaaggcagtagatttaactgtaaagtctataaaattggctgagaaattggggaataattatgaaaaagcaagactagatgttgatttggcgagcatatttttaaatataggtagctatgaaacaggagagaaattaataaaggattcttttaaaatagatattgatgaaggtgaaaaaaatggaatggttagattatatgctattataaatctagcagaaatatatgtagaagagggagaatatgataaagctattgaaataagtagcaggataaaagattataaaaagtttgtaaatacggataattacaatgattttgatataatggcctctataatgaagtcaaatgcgtatgtgggcaaaaataatatacaaaaggcaaagacttttttagaaaaagctgattatcttataaaatcagatagaacagtttatatattagataaagatatgtactattatatggcaatgggaaacttagaatataaaagcgaaaattataattctgcaatagataattataaaaaaagtttagagatatctaccaaaagaaagttaactcaggagaaaataaaaaatttaaataagatattaaatatatatgaaaaacaaggaaatatagaatctttaaatgagtatcaaaagatgttaataaatgaatataaagagaacaaaagtataagagattcagagactagtttctatataattgataaagtatcaaacgaaagtaagctatttgaaaaaactaaaaaagaaataaaatattataaaatattatttacagtaattttaattgctatattagggtctacttttttatacaaccgattgaagtattttaaagcacaaaatttacatgatggtcttacaaatgtttataatagaaaaagttttgatattatgtatgaaaagtacagagagaaagatgataattttgcacttgtgatgatagatattgataatttcaagctcataaatgataattatggacataaatttggtgacactgttataaagggaataacaaataccatttgtgttatgttagaacaagatgataaagtctttaggtacggaggagaagaattttctgtattaataagaaataaatctggtgaggaagtagcagatataattgacaatataagggttgcaattgcaaataaaaagtggaatgatgatgtgactgtgactataagtgcaggtgtagctcatatttcagatagcaaagatgtactagaagaagctgataaaaatttatataaagcaaaacaacttggtagaaataaagtagtatataagtaattatatactatataaataagaggtataaatatgaaacaatcaatagctatagtaactgataaaataactaaactatcatctttcttagaagaaaatatacgtttggttttaggtaattatattgatataaaccactattatctggaagttttaaaagagaatgataaaatacaaggtgattttgtactagtaatgaatgatgatagattaaacagtatgagaaagcatttagtacaagatagtaagattatagtgataaggagaacacttaaagaaaatgaaatatatggattattttcaataccaaatggaactgaagtattggttgtaaatgatacaaaagaaactaccttagaaacgataagcttattttacaaaataggagtaaaaaatttaaagtttactccatatattgaaggaaaaatttataaaaatatagacatagctataacgcctggagtaaaggaaaaagtaccaagttatataaataaagtaatcgaccttggtaatagatatattgatatatctacttttatagaaataataaatggtcttagaattgatgttaaagaaatacgtaaaaatttaatggcatattctgagagtttaataagtttagataatggagttaaagataattataggcaactgtttttaaaaatagaagaacaagatgttatattgaatctatcaaaagatggaataatatttacttcagcagatggtataataaacacatttaataaagaagctttaaaaattttaggtataaatgaaaatccacaaggcaaaaacatagaagatatcatttctgaagatttaaatattttacttgaagacaaagaaataattgatgaagtggtatttacaaataaaaaatatataaatgtaaataaaaaaagtattttttctatggggaataaagctgggatatattataacttacaagaaataacgtatataaaaaaattagaacaaaatcttactaataaattaagagaacaaggtcagatagcaagatatacatttaaagatataaaaactaaaaataaaaatatggtaaagtgtgtagaattggctaaaaaaatatctaaatcagacctttctgtattaataataggagaaagtggtactggtaaagaattattatcacaatcaattcataatgcttccaatagaagtaatcaaccatttatagcggttaattgtgcagcagttccagatagtctattagaaagtcaactgtttggatatgaaaaaggctcttttacaggagctttaagagaaggaaaaaagggtctatttgaacttgctaataatggaactatatttctggatgaaattggagatatgcctccattgctacagacaaagttactaagggtattacaagaaaagcaggttatgcctataggttcccataatgttataaacatagatgttagggtcatagcagcaacaaacaaaaacttactaaagatgattagagaaggaaaatttagagaggacctgtattatagactaaatgtattgccaatagatgtaccatcattgaggaatagaaaagaagatataataacacttatgaatttctttttgaaaaacaatgtaagactttcgccagaagttataactattttagaaaaatataattggccaggaaatataagagagttacaaaatgttgcttcttatgtaagtctaatgtgtgatagtatggtttttagagatgacttaccaccatatataagggtagaatgtgctaacaattatgaagatggatttggttatacaaaaaaagaatttgaggaaatactgaggattctatatgaaagaagagagtcatcctctggagttggaagagggtttataatcgaaaagcttatacaggaagggattgagatttctgaaagcaaagttagaaaggtgctatcttatttaagtgaatgtggatatatatcatctaaatctggtagaggaggaagtcaaataacctcagaggggataaaactttataataatataaattaagctaagtatttgatattgaaatcacatattttgaatttagatatttaaataataaacttttatatttatagagattaatttatactatgtcagaaagaatattgtaatttataattaaatattaataggtttttaaaataggattagataggtaataggttaagttagaataacccattacctatttttatttgtaagaaaagtgtacatagagttaaaagtaaaaaatacaactaataaaactattgaaaacactagataaataataaataaaaataattataaattttggcatatatattgctaatcatagagataagacgacaaaataattgggaggtttaatgatgaaatacaaaacaacagggacttgtgctacagaaattgaatttgaagtaaaagaaaataaagttacaaatgtaaactttataggtggatgtgatggaaatttaaaagggctaaaagtattagttgaaggcatgaatatagaagatgtaatacaaaagttaaaaggaatagagtgtaaaacaaagccaacatcttgcccagaccaactgtctctagcattggaaaattatatgaatataaagtaatacataaaacaatcgattagttaggagtttaattatgaaaccaataatagggattttaggaaatttaataataatggaaaatggtatgtttccaggtcttgaaaggtcatatgtaaataatgattatataaatgcagtgctaaaaggtggcggtagtccagtaataattcctgtaaatacagataaagaagttataaaaaaacagattgaaatggttgatggagtcttaatatctgggggatgggatatcaatcctcaactgtatggagaagaaacaagagaagaaacgacatttatatatccagaagtggatgaatttgatttaattgcaataagtatagcattagaacttaaaaagcctatattaggtgtatgtaggggactacaaattttaaatgtaagtttaggaggaactttatatcaagataataatcttatagaaggaagttatataaaacatacacaatcttctaaaagacatgtagctactcataaagtcgatgttaaagaaggaagtattttagagggaattttaggaaaacaattacttacaaatagttatcatcatcaaagtgtcaatcagcttggaaaaggattaaaagccatagcatactcaaaagatggtataatagaagctattgagaaagaggaggaaaattttgtagtaggagtacagtggcatccagaaatgatggtagattactgtgataaaatggaaaaactatttaaatattttataaatatttgttcaaatttataatataccttggggggattgaacatgaacgaaaagaacaaaatgggattaataagtattatacttttaggtattaatgcagtagtaggagctggagtttttctattaccaggagatgcaatgaaatcatttggtgtagcaagtatatttgtatatatatttgatatgttgttagttttatctatggcattctgttttgctgaggttgcaggtaaattcaataaaaatggcgctgcctatgtatataccaaagaagcttttggagatttttgtggttttgaagtaggtcttatgaaatgggtaataggatgtatttcttggggagctttaatagtaggttttcctacatcattatcagcagtatgggctccagcaggtgaaccacatatacaaaaaattataattgtagccatgatagttgggcttacaattataaacttattaggtgtatctctatcaaaaattgtacaaaatgttataactgtaggtaaactaattccattaatactatttataggaataggtatattttttataaaaggagttaattttacttcttcaacaatggtacctccaggagctggagcaacagagtttggagcagcagcacttttaatgttttattcatttacaggatttgaatctatagcagttgcagcagaagatatggaaaatccacaaaaaaatataccaatagcaattataagtgtaatagtaattgcatcaataatatatatattaaatcaagttgtatgtgttggtatactaggagattcgttatctagtacatctacaccagtggcagatgctgcaagaatatgctttggaaatatgggagctggattggttacctttggaacattggtttctgttggtggaatttgtatgtgtggtgcttttgtaaatccaagaagttgtgtagctttagctgatgataaaatgttaccaagaatatttgcaagaaaagataaaaaaggtacaccatatgtagcgataatagctactatgttaatcactataccaatagctctatctggaagttttgctgaattagcagcaataagtgcagttgctagattcatacaatacataccaacatctttatccgtattagtgtttagaaagaaaagaccagaattagtaggtacttttaaaactccttttggagcagtgattcctctaattgctgtatgtgttggaacatggttgttattccaagcatctatgcatcaattaattatgggattaggagctttggcaattggagtaccattatactttataatgaagtcttataatagaaaagtctgtggtgaaaatttaaagaaaatagtttaattatgttataagaatttattgagttaaaattagacattggcagaaaattaaatacaaataagtatctataaggctatattaaaatattattaattttttattttaatatagccttatattgttatcaataaatgaaaaatattgtaacaacagaagaacaatagtattatgtttatagataaaaaacttattaggaggtaaatttatgccaacaataacattaaaaaatggtgtagacgtacttattagagaaggtgtaagagaagatgcttaaagcattatagatttttataatgaagtgggtggagaaactcattttctgtcatttggaaaggatgaatataaaatatctttggaggaacaagaaaatgctatagaatcagcaaaagcatctgataattctgttaaactgattgcatttatagatgatgaaatagttgggattgcaacgattgattctaatcaaaaagcaaaaggaaagcatgttggagtattaggaattgttgtaaaagaaaaatattggggaattggattgggtaaaaggcttatgttagaccttatagaatggtgtaaatcaaatggaataaccaagaagataactcttgtcactaatgaagaaaattataatgctataggattatacaaaaaagttggatttgaagtagaaagcatactaaaaaaagaatgttattataatggtgtttatactgatttaataggaatgtcacttttattgggaatataattagtgtacattttatctcgaaaaaagtatattaagtatggtataattaaaaaagaatataacttaatataattttggaggacgaattatgaaaaatctgtgtaaaatatcagatgattatttaaacagcaagcttaagtatttaaagttattatcaaaacaatatccaagtatatcaaaagcaagtacagaaataataaatttagaggctatattaaatcttccaaagggaacagagcattttataacagatgtacatggtgaatatgaaccatttgtacatgtattaaaaaatggttctggtgtaataaagagaaaaatagaagaattgttttcaaatacaataagagacagcgaaaaaaaaatgttagcaactcttgtatattatcctgaacaaaagttagacctaataattaagcaagaggaaaatatagatgatttttatagaataaatatttatagacttatagaactttgtaaatatgcttctagcaaatatactaggtctaaagttagaaaactgttaccagaaaattttaaatacataatagaagaacttttgcatgagcatgttaaaagtgaacataaagaagagtattataaaagtatagttgaaacaatagttgacataggaatagctaaggagtttataattgctatttctacagttatacaaaaattggttgtagatagacttcatgtaataggagatatttatgatagaggtccaagaccagatataattgtcgataagcttattgaacatcattgtgtggatattcaatggggaaatcatgatatattgtggatgggtgcagcctcaggtgaaaaaacttgtatagcaaatgcactgaggatatcagctagatatgcgaatttagacattgtagaagacatatatggaataaatctgttgcctttagccacttttgctatagaaatgtataaagatgacccttgtaaagaatttattccaaaggttaatgaccaaagtgtaacaacaacagaaaagtctttaatggcaaaaatgcacaaagcaataagtataattcaatttaagcttgaaggtgaggttataagacgaagacctgaatttgaaatggaacatagacttttgcttaatatgataaactatgatgaaggtacgattactttaaaaggtaaaacatataaattaaaagatacttatttacctacaatagacaaaaaagacccatataaattaactatggaagaaagaaatgttattgataaattagtatcttcatttagaggtagtgaaaaattacaaaaacatgtttcatttttgttttctaaaggaagtatatatttaaaggctaactcaaatttactgattcatggatgtgtaccattaaatgaagatggaagctttatgtctatgaatataatgggaaaagagtataaaggtaaggctcttatggataagatggagtctctagcaagagaaggatttttctttaaagataaggcagaagaaaaactatatggtatggatattatgtggtatttatggactgggaaatgttcatcattatttggtaaagatgatatgactacatttgaaagatactttatagaagaaaaagagactcataaagaaaataagaatccatattttaaacttagagaaaatgagatggcttgtaaaagattatttgaagaatttgatttagagcttgatgaatcccatataataaatggtcatgttcctgtggagagtaaaaatggagagagcccaataaaagctaatggtaaaattctcgttatagatggtggtttttctagggcttaccaaaaaactactggtatagctggatacactttgatatacaattctagaactttgcaattagtatcgcatgaaccatttaattctgctgaagaagccattgcaaatgaaagtgatatcttatcgacaactgttgtagtagagcataaggcaaagagaaaaatggtgagagatactgatgaaggagtaaaaatacaagaggaaatagaagatttaaaactacttttaatggcttataagaaagggctaataaaagaaatgtagatattatagaggcacttcataattgaagtgtcttcttgttaatacttattaaatatattataaagattaataatagtagtttatattatacttactaagtgaatccaagataaatgggttcactttttttatttataaacattattaaaaaaatatagatgttttggttatattccttgtcctttataaatagaattatataaacaaaggaggaggacaagagatgaataaactttctgatgaaataataaactctctttctacaactataagagaaaaggtagaaaaagtctcaaacaataatctgaacatagaagaaattaggttacgctcacaaaaaccattgatactaaatgcaaactctaaagattatttttacaatcaaaaaactatgacacttgatttaaatcaacaaaactcatatgtagtaacaagagaagatgtagagcaaacttttcaaataatatgtaaatattcaatacattcatttatggatgacataaaaaaaggattcataactttgagaggaggtcatagagtagggttagttggaaaagcaatagtagaagatggacaagtcaaaaatataaagcatatatcatctttaaatataagggtatcaagggaaattattggatgctcggataagattttaagtcatattataaagggaaaaaatcagattaataatactttgataatatcaccacctcaatgtggaaaaacaactttaataagagatatagtaagaaatttaagtaatggtaatgaagattatggatttaaaggtttaaaagtagctttggtagatgagcgtaatgagatagcaggagcttatctaggtgttccacaaatggatgtgggaataagaactgatataatagaaacttgcccaaaagatttgggtattacgatgcttttaaggtctatgtcaccaaatgttattgtgacagatgaaattgggagtgaaaaagaaataaaggcattatacacagcattaaatggaggtataggattaataactactgtgcatggagattcaatagatgatatacaaaatagaaaagaattaaatagacttctggataaagagttatttaaaaaggttataattctttctgcaaaaagaggagcaggaacgattgaaaaaatttatgatttagaagaaaagagatggtattttgcaaattaaaataattattatagctctcttggtaggaagtagttatttgataggtgaacaaatatacaaaacttatactcgtagacataaacaattaaacgatttaataagagttttagaaattttgaggatggatttatctttcggactttatacattagaagaaatctttaataggataggtggaaataaagagttttgtttttggaaatttttctatcaaatatcagaaggacttcacaatgaacaaagtaaaactttggaaataataatatcagaaaatattgatgtcttaagtaaagaaacttatctaggcaataaagaaattgaggaactgaaaaatctaatacttactttagggaaaagcgatatagagtcacaacaaagaatgatagatttatctatagaaaatttgaaaaaacaaacctatgagacaaaggaagatataaacaaaaaaggcgtattgtataaaaaattagtgacattcataggtataggtatatgtattatattgatttaatatggggaggtttattatggaaatatcattgatattaaaggttgcaggtgtcggtattctaatatcagtattgaatatgatattggaaaaaacagatagaaaagattgggcaggtcttactacattagcaggtgtaataatcgtattgggtatggtaataacagaaataagtgacttgtttaatactgtaagaacaatgtttcaactttactaaaaaggagggagtaatttggaaataatgcaattaataggaattgcaatcatttcaactacactctgtttagtaattaaaaaagatagaccagagatagcaaatttcatagcaataataactggagtaataatactattgtcagttatgtttaagctaaattttatagtagatagtatacaagatttggctaacaaggctaacataccgactatgtatatatcattaataataaaattaattgggatagcatacttaatggaatttgcgatacaactttgtaaagattgtggggaaggaaacattgcttcaaaactagaatttggaggtaaaataatagttatgtcaatgtctttccctatacttttgtccattgtagaaatggtggtgaatataattccatagatgtgtatcttggaatgaatataagtatattagagaactttcgttgtattgaggtttatagagtgaagagaggcatggttgcttatgaaaaaaagatttttaccaatgattataggttttttatttactttcttttttgtaaatatctttgctattatgatatttgctaatgaagtaccaagtagtgaagataaagaatatggtgaaacaaaaaatagcatagataaatatatagatggtcaattagacaagctagatataaatgagattcaagactatataaataaagaaatagttattaatgatgttaatttaaaatcatttgtaaaagatttaattagtggagaaaaaaatatcttagatttattcaataaagatggattgaagatattgatgtttgatgaatttaaagcaagtttaaaggtagtagcagtaattttggtactggctctgttatcatctattttaaagagtctggaaaactctttttcatcaggtgcagtaagtcaaatagcaacatatataatatttatcacaatggtatcacttacacttattggttttaaagatgtattacagatttgttatgatgcaatagaccatactgtaggtcttatgcaagttataatgccaatattaataacatttttacttttaattgggttcccaataacgtcgactactttgaatcctatcttcataggaggagtaacatttataaatgtattttttaaaaattttctatttgtatctattactgttgcatttggaattttaataataaacaatttatcaaaaaatataaggctaaagagatttttctcctttgtaaaacaaataaattatgtttctattggagctatgtttactgtttacttaggtcttgtatccatacaaggattgtatgtaaccagttttgataaattcagtgtaaagactgctaaatttgctataggtaattttattcctgttgtaggtggatttgtatctgactctgtggatattttattatcttcatctcagcttataaaaaatatatttggaggaatagggcttatcttacttgttggaatttgtttacttccagtaataaaaattttatcagtaatagtagtgtacaaattagcagcaataattgtagagcctgttggagaggatggaatatctaattttttaaatgaagtggcaaatttaatgataataatgctagcatcagtaattgctataacagtaatgttctttgtaactgtagctatcttgacctcgataagtgtcgtaagtcaagggtaatttatatatcagtgaaaaataattacatttaatctaatgtttttagagaggaggatgctatgttagagggcataaaggcatggatagttagtgttttgataggagcatttatagtaaatatagtagatatgattttaccaagttctaagataaaaccttatgtcaacctagttttaaactttatgtttgtatttattgtaataactccagtagtaggatttttttcaaaagatatgagtttagaagatagaatattaaaatctatgggaaactacaacaagcagtatgtagatagtacaaatgctttggcaaaagagactggaaataatagtctatccaagggatatgaggatgggttaaaagaagtacttaaattaaaacttgatgaatatggttatgatttagaagatatagagcttaatggggcaaatataaataatataaaaataaaagaaaagaataatagtgcaaaaagtaataacagttccaatgaagaaaataaaaataatagtactaaaagagaggaagaaaacataaactctaatgacaaagaaaattctaaacaagtcttcaaaaaaggtacagagtatgggttgaacctaaatgaagaaaaattaaaaaacgacttaataaaggtgctggatgtttctatagaagatatacaaattgataaataggagttgggagaatgttgaaaaacttaaatgacaaagataagagaaaggtatattcactaataactatagcaggaatatgtgtggtttcattagtattattatcttgttttcctagtagcaaaagtgataaacaagttggaaaaacagagactaataaaaatgctgaaaagcaagtcactaaaaaacaagaaaaagatgatttagagtcaaaattaacagcaatactatctaaaattgatggtgcaggagacgttgatgtaatggttacatttgaatcaagtgaagaaatacaacctgcttttaattcaaataatacaacagaaacaacagaggaaaaagatgcacaaggtggagaaagaacagttacgacttctagtgaaaataaaacaatgataacttcaaattcaagtgaccctgtagttataaaaactacagagccaaagataaagggagtgatagtggtagcaagtggagcaagtgacccaagtgttaaagagacactttatagtgcagtacaaacatcattacaagtagctggtcatcaagtagaaatatattctaaataaatacatataaccggggggataaatgaatgaagtttaattataagggaagaggatttgtaataataactttaactgcaatgttagtggtagtaggaacagtgaattatcaactaagtaagaaatctttattagaaacatcaaaagagtttaaggcatatgaagaagcacagttgcaaaaaaatactgatgatagtgatagtagtaagacagaggattctagtaatgtagataaacaaggtggtaaggaaagtgctgatattgatatagtcgatagcaaagctagtaaagtaaaagaaaaggcaactgagacaagtaaggaaataaaagctcaattatcatcagagaaaaatatgaaaaaggcatcttatattttagatatgaaaatgaatagagaaaaacaaagaaatgagttagttcaagatttaaatgaaatgataaataatccatctacaacagaagaatctagaaaagaagcttctaatatgaaattaaatatagttaaaattcaagaaaaagaacttcaaatagaaaaccttttgagtacaaaaggatatgaagaagcgttagtttatataagcgataacaaagttaatgtagttgtaaatgaagctaaattagaaaagaaagatgcagcaaaaatatttgatttagttgcagaacaagccaatgtgaagtatgaaaatattaaacttacaaataataatagtaataagtaaagtataaacctcagaattaactgaggttattttcttgcaaagtagacttgtatttggtattattatacttataaaaatagttccttaaaatcaggaggtaagttttaatatggaagataataaatttggacaagtaaaaatatctaatgatgtaatagctacaatagctggtttagcagcattagaagttgaaggcatagaaactacagcaacattaacagataagttgttaaaaaataatggagtaaaaatacaaatcgaagaagaggatgttaatttagatgtaatggttacgataaagtatggaatgtcaataccagatacagcttttaaagttcaagaaaatgtaaaaaatactgttgagacaatgacaggactgaaggtttctcaagtaaatatacacattcaaggaatcagctttaagaaggataaagttgataaagaagaagcaaaagcaactaagaaaaattaatattagccctctgaaaagtcagagggttttttgctggtaattgattttatatggataattaaacttaaaggagaattttgattgatgaaaaaagatagggcacaaaagagtacaacaagagaatatataatgaaacttatataccaaataaatattaataaagaagattttgaaactttagaagataaagtagataattttttaaaagataattcagaacatattataaatagatataaagaacttgcacttcaatactcaaaaaatacaaatttaaagttagaagatactgaaattgaagatgttatagacaagaaatatataaatacagtatgcaaagcattaaaagaaaatcatgacaaaatagatgagttaataaataagcatgctaaaaactggacagtagatagaatgccaaaggtagatgtttctatacttagattgtctgtgtgtgaaatactttatttagacactcctaataaagtatcaataaatgaagcggtagaacttgcaaaaatatattgtgatgataagtctcctaaatttataaatggtatattgggaagtgttgttgatgaaattgggaaataatataataattggaattgatactagctgctatactacttctatagcagctatctctttagataagaaagttatattcaatgaaaaaataatgttagaagtaagggataattcaaaaggtttaaggcaaagtgaagctgtatttcaacatatcaataatttagggattcttagtgataggataaaatcttttaaagataagtttaatgtagaaggagtttgctcatcaaaaaaaccgagacctgttgaaaactcatatatgcctgtattcaatgtaggtcataattttggaaaattattgtctagtatatatggttgtaggttttatgagactactcatcaagagaatcatattgaagcaagtttattaaatagtaaattaaaaaataataataaatttatttctgttcatatgtctggtggtactacagagatacttttaacaagcaaacaagatagtcatcacaatgtatgtgatactaatttaggtaaaattgccaaaataagtattaaaaaagatgataaaagtaagttatacaataattttggatataatatagatataattggaggaagtaaagatattagctttggtcaactcatagatagagtaggaattaagcttggatataaatttccttcaggaaagtatttggatgaaaatgctttaaattgtaatcttaaaatagaaagtggtctgaaaacttctgtaagagatgggtatatgaatttatctggattagaaaatcaggtaaataagattataaatgataatggagataatactaatcaaaaagaatacatatctaaattagtattagattcagtagttagaaatatgtttaaatctttagtatatttatgtgaaacttataatgtaaatgaagtagtatttgctggtggagtttctgcaagtaagtatattcttagagaattaagcatgaagttaagaaaaaagcatatagaagcttattttacagaaccacaatattcaactgataatgctgtcgggtgtgctataataggattgaataactttttaggagaaagagtatgaaactaagagctttagatataagtgaagcaaactcatatattaaaagaattttaataaacgacccaatactttctaatcttaaagttaaaggagaaatttctaattttaaggttcatagtagtgggaatgtatatttatcacttaaagatgaaacatcaaagttaaactgtgtaatttttaaaagtaattttaatcgcaatttaaaattagataatggtgtaaaaattatagctaatggatatatatcagtctatgaaagagatggtgcgtatcaattatacattaatgaaattgaaatagagggaataggaaatttacacatagagtttaatagattaaaggaaaaacttaataaagaaggattatttgaccctaaatacaagatacctatacctaaaatgccaaactcaattggcgttataacatctccaacaggtgctgttataagggatataataaatgtaataaaaagaagatatccgaaagttaatataaagctttatccagtaatggttcaaggagataaatcagctgaagaaatctgtgaagcaattagatttttcaatcatatgaagaatgttgatacacttatagttggtagaggtgggggttcaatagaagaactttggtcttttaatgatgaaatggtagcaagagaggtttttaattctcaaattccgataatatcagcagttgggcatgaaacggattttactatttgtgactttgtgtctgatatgagagccccaacgccatcagcagcagctgagattgctactccatcattggatgatataaactataaacttggaaacataaaaagtaggatgagtaagtctcttacaaatcaaatagagctagaccaatataggttagaaacagtatttaataagataaataactatttagattcgtacacaataaaagataaagttatacaattagacaaaatatatgataaaataatttttggaatagaaaataatttaaaattagaagatgaaaaattagtaaaaattggagcattactccataatttaagtccattagctactatggatagaggttatagtataactcaaaaaaatggaaaagtaataaatagtataaaaggattaaaaataaaggatagtatagatatagtattaaaagatggaaatttagaatgtatgatagataaaattgaaaataaagagggatagtatgaatttaacctacgaagaagcttataaaagattagaaagtattttaagtgaattagaatctaaaaatgctagcttggatgaatctttaagcctatatgaagaaggtataagcctttataaacattgtaataagcttttagatgatgctaaattgaaaataagtaaatttaatcaattaggaatagaagaagactttaaaatagaggaggaataaaattggaatttaaacaatgtctaaaagaaaaagcaagttttgtagaaaaagtacttaaagaatatatgcctaaagaagaagggtatcaaaaaactgttattgaagctatgaactatagtttaagtgctggaggtaaaagattaagaccaatacttacattggaggcttgtaaaatagttggaggaaatgaagatgaagctattccttttgctattgcaattgaaatgatacatacatattcactaatacatgatgatttgccagctcttgacaatgatgatttaagaagaggaagaccaacaaatcataaagtatatggagaagctatggggattttagcaggagatgctttgttaaactatgcttttgaagtaatgcttgcaggctcaatcaataaagaaaatccagaaaagtatctaaaagctataaatgaaattgccaaaggtgctggtatatatggaatgataggtggtcaagtagtagatgtagaaagcgaaaataaacaaattgaaaaagaaaaattagattatatacatatgaataaaactgctgcaatgatggtaggctgtatgagagcaggagctactataggtggagcaaattctgaacaaatggaagaaataactaaatatgcaaaaaatatcggattatcattccagatagtagatgatatactagacatagtaggagatgaagctaagttaggtaaaaaggttggaagtgatatagaaaatcataagtcaacatacccatctcttttaggtttagataaatctaaagaaattgcacataatttgattgatgaagcaaagaaaagtatagaaaaattatctgatgatgtagattttttaaagggattggctgaatatataatagatagagaatactaaaatatacagctaaaatcgaggagggaaaaatggattttttttcggagatttttaacaatggggctttgggaataagtctgattgcttgtttcttagcacaatttataaaaatatttactggtaaggaaaaaagaattgagttatcaagaatacttatttcaggaggtatgcctagttcccatagttcttttgttacaagtttagctacagtggtaggtattgaaaaagggtttaattctactgattttgctataattaccgtacttgccttaattataatgtatgatgcagcaggtgttagacgagctgttggtaaacaagctactatattaaatcaaatggtggcagatatacagcatggaaagcatatagagcagaagaaattaaaagaattaataggtcatacaccactagaagtttggtttggagctttacttggaatagtaacagctttaatattgatgtaaattgaaaatttacagaataaaggtgaggataatatgtataaatatttagataaagtaaattctccaaaggatataaaaaatatgagtatagaagaaatggatttacttgcaaaggatataagaaagttcttagtaaaatctgtttcaaagacaggaggacacttagcttctaatctaggagtggttgagttaacattagcacttcataaagtatttgatagccctaaagataagattgtatgggatgtagggcatcaatcttatgttcataaaatagttactggaagaaaagattgttttgtatctttgagacagtttaatggactaagtggttttccaaaggagaatgaaagtcctcatgatatttttgatacaggacatagcagtacatctatttctatagctacaggtattgcctgcgctagggatataaaaaaagaaaactatagtgttatatctgtgataggagatggttctataacaggaggtatggcacttgaagctttaaatcaattaggatatatagataccaatatgatagtaatccttaatgataatgagatgtccatagataaaaatgttggaggaatgtctaaatatctgtcaagtattataagaaactcaacagttgagaaaatgacagatgaagttgataaaattttaaatgttacacaaacaggtgaaattttatctaagactgcacatagatttaaagataaactaatgtatagcttttctcctcaggactgttcattttttgattcattaggtataagatattatggacctatagatggccataatactaaagaactaatagatatattgagaaaagctaaacacaaaaaagggcctgttcttttacatgtaattacgaaaaaaggaaaagggtacagatttgcagaagaacaacctgataaatatcatggagtatcaaagtttgatataaagacaggtgttacatctgcaaaagttaagtctatgtcaattagtgttggagaaaaacttgttgatatggctaataataatgaagatatagtagcaataacagctgcaatgccatctggtacagggttaaacctgtttgaaagtgcatatccaaaaagatattatgatgttggtatagctgaacaacatgccacaggatttgcagcaggtcttgcaaaaaatggtatgaaaccttactttgctgtgtactcatcatttttgcaaagggcatatgaccaagttattcatgatgtatgcataacaaaaaagccagttacttttcttatagatagagctggattagttggaaatgatggagaaactcatcatggtatgtttgatttaagttacttaaattctattccaaatattgtagtaatggctccaaaagacacaagagagatggagcttatgatggatttgtcattaaaattagattgtccactagcaattagatacccaagaggaagtagttattacctagataagggagaatatggagagattgtactgggtaaatatgaggtattagatgacggtcaagatacagtcatactttgtattggaagtatggtaaaacatgctttagaggctaaagaaatattatcaagagaaggaataaatccgacaatagttaatgctagattcttaaagccaattgatgaaggtatgttaaaagcattattaaaaaatcataaaaatgtagttactatagaggataatattgtaactggaggatttggaagtagaataaacaagtttattatagataatgaatataacgtaaatatacttaatatagcaataccagaagaatttgtaaaacatggcaatatagatgaattatatgattttgtaggattatcgccaaaaagtattgctgataaaataaggaaattagttattgagtaaaaatctaatgtagatattgtaaattaaaatttatataaaatatagaatttatcaattagaataaatatcaagtgtgttacttcaagctactttagttatcattaaagtagcttttaacagaaaggtaattgtatgaaaaaaagaatagatttattattagtagaacaagggtactttgaaagtagagaaagagccaaaaaagcaataatggctggattggtttttgttgataatcaaaggtgtgataaggctggtacagaagtaaaagaagattgtagtatagaagtaaaaggaaatccaataccatatgtcagtagaggtggtttaaagcttgaaaaagcaatgaaaaactttgatttgactattgatggaaaggtatgtatggatataggggcatccacaggtggttttacagattgtatgctcaaaaatggagcaataaaagtattttctatagatgttggttatggtcaacttgcatggaaattgagacaagatgatagggttgtgtgtatggaaagaactaatataagaaatgttacaatagaatatacaaagcagtttgctgattttgcgtcaattgatgtgtcttttatatcgttaaagttagtacttccaaaggcaaaggagttagtacgtcatgatggggaagttgtcgctttaattaaacctcaatttgaagcaggaagagaaaaagtaggtaaaaaaggagtagttagagaaaaatctacacatatagaagttataaaaatgatttctgatttctcagtcgaaaatggatttgagattttagggttagatttttctcctattaaaggtcctgaaggtaatatagaatatctaattcatttgagaaatggaaatgaaggatatgaatttgatggtgagacatacaataacaaaatagtagaagttgttgaagcttctcataatttagacaaataggttaaaagggggcttagatttgatcctcgaattatatatgaaaaattgtgccttagttgaagaactaaggttgaatattgataaaaacttaaatatacttacaggtgaaactggttcaggaaaatctataataatagatgcacttggactttgtttaggtgataaatatgataggtcttttttaagaaaaggaacagataagggacttgttgaggctgtatttttttcagacaatagatatcttaaaaaaatattagaagaaaatgatataagtatggaagatgataatttattggtaataactaggttgatatactcagatggtaagagtactgctagagtaaatggaaggactgttaaagtgtctcttcttaaagaaattgcatctacacttatagatatacatggtcaacatcaaaatcaagctttgttcaataaagatactcatttaaaatttctagacctttttggagaaaatgaattggaagagtttaaaattgcttataaaaatgtgtaccataagtatagtgaagtaaaaaaagctttaaattgcttgacagaaaataaagatgagatgcaaattcaacgagaaatagatttattaagatttcaaataaatgaaattgaagctgcaaatctaaataagaatgaatatgaagatttattaaaacaaagagaagtttatagaaatagtgaaaagatatataataatctaaattcgagttatagcaagttacataatggtgagtataatgttattgacctaataggtcttgcatctaaggaacttaatgacatatctaaatatgacagtgttttaagtgaatatagtgatactgtagaaagaattatgtatgagttacaagacatatctggtgagataagaaattacaaagataatatagactttgaaccttatgagctagagcagattgagcttagaatcgacgaaattaataatttaagaagaaaatatggagacagtatagatgatatatttgagtattatggaaaaattaaagatagattagatgaaatattaaatagagatgaaagagttgaacagttaaaaagcaaactgatgaatatagaagaagatttaaaaataaaagccagtaaattgactaaagcaagaatagaagtagcaactactttagaaaaaatacttcttgatgaattaaaaagcttaaatatgaaaaatgtaatgttcaaggttaattttgaaaaaggttcatttactttagatggagtagatgatattgaatttatgatatcttttaacttaggagaagatattaagcctatatataaagttgcatcaggtggtgagatgtccagatttatgttagcgtttaaaaccatattggctgatatagatgatattgatacattagtgtttgatgagatagatactggaataagtgggatagcagcacagatagttggtgagaaattgagtgatatagcaaagaaaaaacagataatatgtataactcatttacctcaaattgctgcaaatgcagacactcattattgtatagagaaagatacttcaaataataggacgtttaccaatgttagtaagttaaatgaatctcaacgaaaaaatgaaattgccagacttatagcaggtaacaatataacagaaaaaactattgaacatgcaagtgaaatcattgaattggctaaaaaatgttagtgaaaaacaagcattttaataggtgtaaagaatttttatagaaatgctttacacctattttttatgatgaaattattttaaaatatctagtgcctatattgaagaaaagtaggtttgaaaatggaatgaactttgtataaatttgtaactttgaaatttctaaatgcttaagtataatattatttattaaggtagtagtgaggggaggcataaaatgaataaaaaagatactatgcacttaatttttataattgtaatttttattttattatggtatattgtggtagcagtaagtgagattaataaaaatattgaaagttgtagtaacaaattagattatttgtcacaagagcttatgagtactaagtcggatattagtaatactataaatgaagaaatgtcaaaaagttatataacaaaaagtattgacttaaaagtaaaaaaaatcgagaaaaaagaatgtactattgatgtagatgttcaattaagtaaacttggaaaaaatggaaaagtattttttatgtataaagaagatagtgataaatggaatgaaactgagatgacaaaacatggggaattatcatatgcatgtgaaataaagataaatacaggaagtgaatatgattataaagtagttacaagtggagatatatctgaaagttctgatgtacaaaaactgactaaatctgattatatgcctgaacaacctatatttaattctgggataagagataatagagaatactttattgaaatagtagaaaatagtaatctttttaatcatgagagtgaaaagtcaaaaaataaagcttacgataatatcaggttagaaaaagtagatattattgtaaatgaaggaaaaaaagacactatatacaaagcccaattagctgaaggcttagatgatggcaaaactaataattcaaatagaaatcaagtgaattatgaagtaagttttcctaaaagggatattgatgacataatttatattaaagctaaacttacatacaataatggagtagaatatacaaaggatataactgaagatataactatgggattacaagatttagaaaaataaatacatatttaaataaatattcaaatagatttgttcacaaatagagtataaataaaactgtagtagttttacttatactctattaaaaaattataattttaattccatatatctagccccttcaattggattataagtataaagttctatatcataaaaaccaaacttttcatataatccttgtgcacttttcatgcttggaagagtatctaatctcatgtgtgtatatccaatttttttagcttctacaatgatttcttccaatagtatttttcctatttttaatcctctaaattgatttcttacatataatctttttaattcacatattttaccttcaagtttttttaaagcaacacaacctgccaaattttcatcaacaaatgccaatatcaatgagcctgaaggttttttatattttcctggaagtgtttttaattcattattaaagtcttgaaaacataagtctatatttagagaatttgaatattcagtaaatagaagttttacgttttcaagattttctaaatctttttcttcaacaaattgtaaagttatattttgagccattttatccgccattatataaacatgtttatataatgacttcacctccttgatatatgtatatttttcttaatatcaattagattttaataccattactttttcaccaccatagtcaagctctccattaaacttaaatccaaaatctttataaagcttaatagccattttattgtcttcgaatatactaagatatagttcatcacagttatattcatttttaagatgatttacaagaaaatctaatgatgcttttccacatcctttaccttgatattttgaatcaatcataaatctatcaagccaaactctatcatcttctaaacgaccatacatagcaaatcctattaaagaattttcatcatatattccaacaggtacccaagctgttataaatttagattcagcaatagaaagtgcattgctttctatgtaatctaactgacttttatctacagacaaactaactaaatcgtgccaattatttatgtctgcaattcttacatttaatttcaagatattaccgtccttcaaactttttgttacaatctaatactatcatattatgtattaaaaatcacttattaagattttaaataaactttttgaatgaataaattctcaggaaaaaggaattataaatacataataatacagcataggagtagatggatatatgaacaaaataaataaaaatttcaaaaatatttggataatattaggagctgtatcgatttttaccatggttataatttttaataaaaattgtaatgttaataaagagactcaaatagaagcttttacaattaagaatcatgataaaaaatttgtatatcctatgggaaatataattggagtaaaagcaaatacagatggtgtattggtcttaggatatgaggaagaggatgtaggctatattggaggcatacaaataggtgataatatagtaaaaatagataataaaaggataaaaaatagtcaagatgtatcagagattttgaataagattaaaaaaagtaaagttgaagtgacttttgagagaaaaaataagtataaaacagaagtaatagagactaaaaaagaaaatggcaagtataaacttggattatgggtaagagataaaatatctggaattggaactatgactttttacgaccctagtatggaaaagttcaaagcaatcggtcatgccataaaagattcggatactaatgaactattaaagataaagcaaggctatatatataagccagaacaattaaaaatagtaaaagctagtaatgaaaaagtaggtaaaataaaaggagattttaatgacagcaatttaatgggtaatttctcaaataattcagagctaggtataagtggtaatattacagaaaaccataataaagagtttaatgtagcaaataaagaaaagcaattaatagaagttggaagaccgcaagatgtaaaaataggagatgcagtaattctttttgaggataaaaacaaaaatataacaagctatgatataaaaatagaaagtatagtatatgataaaggaaattatagagatatggtaataaaagtagtagatgacaagttattggaatacacaggaggtatcgtacaggggatgagtggagctccaataatacaaaataataaaattattggtgcaataactcatgtttttagagataatccgaaaaaaggatatggtatttttatagatgaaatgataaaattgtaggtgaggcattaaaaaattttattattttatcaattatctaggaggaatataattttggagtgtcgaatatgctttagagtagataattaggaagcaattgtgtaaaaagtttagttttctgtaataagaagatgttttttaatggggggatttttagtggaaaaaatcaaaatagttttagcagatgacaataaggatttttgtcaggtattaaaagagtatttgtctaatgaagatgatatcgatatattaggcatagctaaggatggaattgaagcattagacttagtaaaaaagacacaaccggacttattaatactagatgtaataatgccacatctagatggattaggtgtaattgaaaaattgaatactatggatatacctaaaatgccaaaaataatagtactatcagcagtaggtcaagataagataactcaaagcgcaataaatctaggagcagattactacatagtaaagccatttgattttgttgtgtttataaacagaattagagagctagtttctaatagagttacacaagttgagccaaaacctagaccagttcaagagactcaaatgactagaagtgattttgttaagaatgtaggaaatatagagacagaaatcacaaatataatacatgaaataggagtaccagctcatataaaaggatatttatatttaagagaagcaataaaaatggttattgataatgttgagcttttaggtgcagtaacaaaagagttatatccaagtatagctaaaaaattcaatacaacaccaagtagagttgaaagagcaataagacatgcaatagaggttgcatggagtagaggaaaagttgacacaataaatcaattatttggatatacggtacacaatactaaaggaaaaccaactaattcagaatttatagcaatgattgctgataaattaagactagaacatagtatggttaaataaacaagacataaaaagtaaggctttttaattaaggcattggctataaatgcgtattacaagcagcgaaacggtataaccactagggttataccgtttcgctattttaataaatataaaaattttctttattatttgcttactatatcaatataataattttattatactatggatatagtatgtgtctttacaagttgtaaactgacagtggtttattttttaatataaatattgactttgatgcaggtaaactttgtatttttaagcgtattatggaatatgttaaataaaaaaatgatgaaatatagtattgtaaatgccaaagatgcaaaacaaacttaaaacatttattttattgttaagtaatgctataatataatgtgattttaataatgatagtggaggtttaaatatgagagtcgaggcccctataaaagtagatcgaaaaaccaaaaaacttgctaaaagagttgaaagtggggaaatagcagttataaatcatatagacatagatgaagttgctgcaaactctttagtagaagctaaaataaaacttgtcataaatgcggctccttctataagtggtaggtatcccaataaaggtccagggatattaactgaaaataatatactaataattgataatgttggagaagagttatttgaagaattaaaagaaggagaaactatagaagttgtagatggaaagatatatagaaaaggaaaatttttaggtgcaggagaagttttagacaagtatgaggtttcacaccaaataaaggctgcctatgagaatttagctgtagaattggatagatttatagataatactatagattatgctaaaaaagaaaaaggatttatacttggagaagtagaaattccaaaagtgaaaactaattatgctaataaacatgtattgatagttgtaagaggtcaggactacaaagaagatttaagtactatgctttcttatatagaagaggtaaagccagtattggttggtgttgatggaggagcagacgctttaattgagtttggatatactccagatgtgattgtaggtgatatggatagtgtaagtgatgaagctttaaaaaaggctagtgaaatagtagtacatgcttatacagatggaagagcaccaggtcttaagagggttgaggaattaggcttagatgcagttgtatttcctgcgccaggaactagtgaagatatagctatgcttatcgcctatgagtataaggctgagttaatagtagcagttggtacacattcaaatatgattgattttcttgaaaaaggaagaaaaggtatggcaagtacttttttagttagactaaaaataggttcaaagcttatagatgctaaaggcgttaatttgttatacagaagtaaattaaaaataaagtacatatgggcattaatagcaacagcattatttcctgtgttggtagttgcatcattgtcaccaggagttcaacagttcatacaactaatgcaattaaagtttagagtattattacagatgtaaattttaggaggataaatatgcatattaatatgaaatattatatagtcactataggggctatatttatagctttgggtataggcatgttagtaggatttaatttaaataataatcaacaattaagtgaacaacaagcaaacataataaatgatttggatgataagtttaatatcttaaaagaaaaaaatgataaacttgacagtgacttagcaagtgtaaatagagattatgaagaggcagttaattttataaataaaaatgtagataagattttagctggttcgctgaatggtaaaagtataggaataatatcggctaatgaaaatgacgattatacaaaaaatatagaagacataataaataaatctaatggaagtattgcatttaatatagtattaaaagaaaatataacaaatccagaaaagttaaaggaaatgtcaactaaactaggtacagatgtaaaaaatgcaaatgatgcagttaattatataattgacacccttaaaaaggaagatgcaagtgacattttaacatatcttcaagaactagatgtaataaagtttaactctcttggaaatacatatctaaaatatgattctgttgtaatagctggtggaaatgatgcaaaagacagtacaaaacagtttgaaaaaatagaaaaatttgtagtttcaaaacttaaatcagagaataaatatttagtagaagttcaaaatacaggagttaaaacttcttatgtagaactatattctaaaaacaaagttgcaactatagacaatattgatgaaggtataggaagtatatctctagctattcttctacaacaaggtaatatagttggtaattttggtagattggatactgcaacttcattgttgccatctattaaatagaaataattttaaggagagaaaaaatggattcttatataagtataataataccagcttataatgaagaaagtagaataaaatatacattagaaagcatattggacattaagcaaataaatgaaataatagttgtggatgatggttcaattgacaatactgctaaggttgtatctgagctagaaaatgaaaagattaaattttttaagttagataaaaatagaggtaaaggatatgctttaaattatggtatcaaattagcaatgaaaaatgcagatattataggttttctggatggagatttaggaagctctgctaaagaagttgaaaaattaatagtacctatattaaatggtgaggcggatgttacaatagccaagtttcctcctgcaaagagaaaaggaggtttgggatttgtaaaaggtttagctaaaaattctgtgtttgagatgactggtgttgagttagatgcaactttatcaggtcaaagaatatttaaaagagaagttttagaaaagtttgatgaaataccttttggatatggagtagaagttggaatgaccattgatatattaaagtatggatttaaaattaaagaagtattagtaaatatgactcataatgaaacaggaagaaatttaaaaggttttattcatagagggaaacagtattatcacataaaaaaggttttaggacaaaaaaagaaagaatggaggtaatatcttagtgaaagattatatactttataccattttattattaactggattatttggaacctatgctgtaattccactatttaaaaatttattgataaatggaaatgtacttagaccaaactataaaaaagatatgataccagtaagtatgggaattgtatttttgcctatgattgtaatcaatggaataatacttgctttctttactacagaatttaaggatttagcgtatatatttatgtttatgtttggtatgatatccatgttttttgcagggatactagatgatgtcattggaaatagagatgtaagtggtttaaaggggcattttaaaagtttatttaaaggaagtcttacaacaggaggttttaaagctttatttggtggatttgtagggcttatagtttctgttgctatatcaaaagacataattgatataatagtaaatacactaataatagctctatcaactaatttaatgaatcttttggatttaagaccaggaagggcaataaaagcatatttattcataatggtaattatatttttaacattgacaggatttgttcaagttcttccattacttatagtaccaaatgtacttgcatactttaattatgatttaaaagcaagggctatgatgggagatactggttcaaacgtccttggaatatctattggaatgctcatttcttttgggtatccatttaacattagattaggatggttaatatttgtagttattatgcatatattcactgagaaatactcattaactaagataatagaaaaaaataaactattaaattttatagataaattgggaaggtagtattatgataagcaaaagagtggggattgttgaatcaatagtaagtcaaactgaaactctagatgatataagagtaaatataaatggaaaaatacaaagggcatataattatcccaaaatatctggaactataaatataggtgatgaagtggttttaaatacaacagcagtagaactgagcttaggtacaggtggataccattttgtaataactaatttaaataatatagaatctactttaactgaaggtgggcatataatgaaacttagatatacacctcttcaaataaaagtggattctgttgaggaacaagaaagtatttatcatgataaatttgcgaattttaaaggattagaaggtctttctgttgtagtagggactcttcatagtatgttaactccatttgcagcttcatttaaaagaaataatccaaataaaaaattagtatatataatgactgatggagcatctcttccaatttatttaagtaaaaatgtggacactttaaaagaaaaaaaattaatagatagtacgataactataggaaatgcgtttggtggagattatgaatgtataaatatatatactgcattaattacagcaaaagaaatactaaaagcggatgcagtatttgtcagtatgggacctggaattgctgggacaggaacaaaatatggatttacagggattgaacaaggctctattcttgatgccgtaaaaaaacttgaaggaagagcaattgcaattccaagaattagttttgctgacaaacgagaaagacatcaaggtatttcacatcatagtatgactgtatttaaagaaattgtaaatgtaaatgtagacataccaataactatatatgatgatgaaaaattgaactttataaaagagcaaatcaatttaaatggtttagacaaaaagcataatataatttatatagataataataaaacgaaagaggatttagactattttaatctaaaagtaaagagtatgggaagaaattatgaacaagatgaggcatttttcaaagctgcaagcacagcagcatattacttaatggaggtttaagatggtattagaagaaaaaactattagtagtgatagggtttatacaggtaaagtaattactttaaaggttgatactgttgaaattccagggcaaggatatcaaaaaagggagttagtagaagttggtggagcagtaggaatagttgcaatcacagatgataataaagttgtactagttaagcaatttagaaaacctatagaaaagccaatctttgaaattccagctggtaaactagaaaaaaatgaaagtccaaaagaatgtgctgaaagagaattaaaagaagaaactgggtatagtgcaaaaaatattaagctaatacataaatttttcacttcagcaggtttttctaatgagataatgtttgtatatttagcaacaggtcttactccaggagagaataatttagatgcagatgagtttttagatgtctatgaaattgagcttgaagaagcatataacatggtattaaaaaatgacgttgaagatgcaaaaacatctattggattattattagtaaaagatatgtttaaaaattaatatttataaaatgaataaccctttgtcctaaagcatattattttataaaggacaagggggaattaaattgagaagaacatatagaaaaaatgattttagagaattaaatagacaaataattattataggattgttgtttatgatgtctattgttgttgggtcttacataaataaaatattgccaggttctagtaacaatatattaaacaatataaatcctgctgtagagtattataatctaaatataagcataaaagatacagtgatacaaaatttaaaatcagatgcaatctttatgggctcaatagctctattaagtctatttgtagtaacaattccagcagtgttggtagcttttgtattaaaagggatgtcaattggttatacaataaatagttgtatattggcattaaaatttaaaagtataaaaatgattttaataatattatttaaaaatttgattattattccatgtgcaatcatattagcattaattagtttaagttattttaaagaaatggtttatgaatttaaaaagaaaaatagaaaaaatatgcaatttttaattaagaggtatatactaaatattataattataatagcactatcattggggttgcaattaatattaaatactgtaagtattggtattattaagttcctagctaaataaaggagtttataatggatattatagagggatatatagattacataaaagataaaaaaaaattatcagagaacacagtggcatcatactttatggatataaaaaaatatatggaatatataaatcaaaaaagcattaaactagtagatatagtagaaaatgatattataagttacttaataaagttggaaaaagataatgtatcaatagctacaatagcgaggatgatatcctctataaaatcttttcatgattatttatttttaaatcatatatgtacaaataatcctgcaaaggatataaaaaaacctaaaataaaaaaagaaaatataaatatacttacagaagaagaaattgaaagactattaaattttccaaagttaacaacacctaaattgattagggacaaggctatttttgaagtattatatggtactggtataaaagtatctgaattagtagagatgaatatagaggatattgacctagatattgattatatatattgtaattcatgttgtaaaaatcaaagagtgataccactttgtgatattacaaaactttacttagaaaagtatctaaaagaagcaagacctaaaatggctgtagaaggtgaaaaatcattattcgtaagttcattaggtcaaaggtttacacgacaaggtctttggaaagtcataaaaaaatattctaatctagccaatatagataaaaatataaatcctacaatgcttagacattcatttgctattcatttgttaaatgaaggtgctaacattgctgttgtaagtaaaattttaggaaatgttaatttatctagtttgcaagtatatttaaatcatatagataaaaacgtgagaagagaaataaaggaaaaacatcctagaaatgatgttgatgtagaattacaaaaagcagaagctaaatagactatatagcaaattttataatttaaaaggagtatatttatatgagcagagtaatttggattgtaattgatagtgttgggataggagcattacctgatgctgaaaaatttggtgatagtaaggatgtaagtacccttggaaatatatttaaggaatatccagatattcagattcctaatatgagaaatttaggtataggaaacatagatggtatagatttttttgaaagtataaaagaaccaataggttgttttggaaagtgtaaggaaatgtctcagggaaaagatactactacaggtcattgggaaatgactggtataatagttgacaaaccatttaagacatttgaacatggattctctaaggagataatagaagagtttgagaaaaaaactggaagaaaagtagtaggaaataaaccagcttcaggaactgtaataatagatgagtatggagagcatcaaataaaaactggagatgtaatagtatatacatcagctgatagtgtatttcagattgctgctaatgaagaagtaattcccctagaagaactctataatatgtgcaaaatcgctagggaaataatgatgggggataatgcagtagctagagtaattgctagaccattcataggtaagaaaaaaggtgagtttgtgaggacttcaaatagaagagattattcactagacccatttgaaccaacagttcttgataatataaaagaatcaggacttgatgttttagcagttggaaaaatagaagatatttttaatggaaaaggaattacagatgctatccacactaaaagcaatatggatggagtggatgaaactttaaattatatgaaacaagataataaaggtctaatatattcaaatctcgttgattttgattctaaatatggtcatagaagagacccagaaggatataagaaagctcttgaagagtttgatagtagacttcctgaaataatggctaatatgagagaagatgatattttaataatcaatgcagaccatggaaatgacccaacatataaaggtacagaccatacaagagaatatatacctgttatgatttatggcaataagattaaaaaaggttttaatttaggagtaaaagatacttttgctgatattggagcaactgttgcagatatactaaatgtaaagttgcctaaacatgggtcaagctttaaagaagatttattttaaactataaaatgataaaaacttagcttaataggatggagagattggaatgtttgaaaagatagcacaaagtagtaaatttataaattctaaaagtaatataaaacctaagattggtttgatattaggttctggactaggtgatttagcaaatgatatagaagaccctgtcacaattaaatatagtgaaattccaaacttccctgtatcaacagtagcaggacatgctggacaacttgtaattggaaaacttgaaggaaaagaagttattgctatgcaaggtagatttcattactatgaaggatattctcagaaagaagctacttttccagtaagggttatgaaagaattaggagtcgagattcttatagtaactaacgctgctggaggcgtaaataaagaatttaaagcaggagatttgatgcttataagagaccatataaactttagtggaagtaatccattagtaggaaaaaatgatgacagatttggtgctagatttccagatatgtcagatgcatattcttctaaatatgtagatgtagttaaaaactgcgctaaagaatgtaatatagatgtcaaagaaggcgtttatatgttttttagtggtccaaactatgaaacaccagcagaagtgagaatggcacaaattttgggagctgatgctgtaggtatgtctactgttccagaagtcatagtagcttctcactccaatataggagttattggtatatcttgtataacaaatatggctgctggcatcttaaatcaaccactaagtcatgaggaagtaatagaaactactcaaaaagttaaatcagaatttatgaatttagttaaaacaacggttaaaaatttataagttaaagcttattatatattttttgaggaagtttataataaaatagttaatgtttaatttgaaaagaattaataaaaagctgtcttgatatagaaagttatttctaataaaggacagtttttttataatactacaacatttgaaagtgttttaaagtttaatatttatttaaattattatagattagaatggagatttcaattatgagaatgtatgatattataaaaaaaaagagagataacttagagcttagtaaaaaagagataaactactttatagaaaactattcaaagggagatatacctgactatcaagcttctgcactattaatgtcgatttatttaaataagatgaataaacaggaaactgtacatcttacagaagcaatgatgaactctggagacatgataaacctgtctgaggtagatggaataaaggtagataagcatagtactggtggtgttggagataagactaccatagctcttatacctttggttgcttcatgtggagcaccagttgcaaagatgtcaggtagaggtcttggtcatactggtggtactattgataaattggagtctataccaggtttttcgacagaaatggagataagtaaatttattgattctgtaaataagtctaaaatagcagtttgtggtcaaagtgcaaaggtagcaattgcagataagaaaatatatgctcttagagatgttacagcaactgttgataatatatcattgatatcatcaagtgtaatgtctaaaaagttagcttcaggagctgatgcaattgtgttagatgtaaaaactggtgatggagcatttatgaagacattagaagagtcttttgagttagctaaatctatggttgatataggtactggtatgaatagagatacaatagggattgtaacagatatggatgaacctttaggttttgcagtgggaaactctttagaagttatagaagcaattgagacattaaaaggaaatggccctaaagaccttgttgagctatgtgaagtattaggagcatatatgttggttttatcaaaggtagcacatgattttgaagatggtgttgaaaagataagagaatcaataaaatctggtactgctatacaaaaactcaaagagtttatagagaatcaaggtggtaataaagatgtagtagatgattattctttattcaaaaaatcaaagtataaatatccagttaaatcaattaaatcaggttatataagtaaaattaaagctgaagatgttggtgtatcagctatgattcttggagcaggtagagaaactaaagatgatattttagatttatcagcagggataattttagaaaagaaagtaggagattatgtaaatgaaggtgaagttttagcttacatgtattataatgatgaacaaaagctttcattggcaaagggaagatttattgattcctactctattgtagattcaaaaatagaaaaaaataaattaatatatggtattgtaactaaagaagagattaaaaagttttagaaaattttagaaaagtgattataaaaggcctaacatgtcaaaaataatgttaggttttttattttttgataaactataaattataccaaaaatatatattttaaaacattttttacaatataaataagtttattctacaagatgattgaaaattaaagtatctagttttataatagaaaatggataaatatacataaggagtagattatattatgaactttaaagaaaatagattgaaaatagcagtattaataattgttattttgattatcttagcaggtatatttgtgtttatacaaataggtccttatgataaaaataacaaaaaagatgtaattattgacgttccaagtggagcatctgttggaaaaatatctgacatattatatgaaaataaattaataaagaatgaactattatttaaacttttggtaaaggttagcaataaagctccgtctataaaatcaggaacatacttacttaatcaatcgtattcaaacaatgatataataagtcttttagtttcaggtaaaatatatcaggatggtataaaagtgactattccagagggagctacatctaaagaaattatagcaatgttagtaagtaaaaatttaggagataaagctacttttgaaaatttaataaaaaaacctcaagaattttatgataaatttccatatttgaaggaagatggaataacctctttagaagggttcttgtatccagaaacttattattttaattcaaagaaacaatcagaagaagatattttaagcgaaatgttaaaagtatttgacagtaaatacacggacaagtttaaaaagaaacaaaaagaattaaatatgactcttcaagaagtaatggaaatggcatcaataattgagaaagaagctgttcttgacaaagacagacctataatagcaagtgtgttttataatagacttaaggtaggtatgcctcttcaatcagatgctacaatacaatatatatttgaagagagaaagaaaattgtaacatatgatgatttaaaaattgattcaccatataatagttataaaaataagggattacctcctacaccaatatcaaatcctggtataaaatctattgaagcagcattatatccagagaaaacagactatttatattttgtagctaagattgatggtggaaataattatagtacaaactatcaagaccatttaaaatacgttaaagaatataaagaagcaagggataaacaatcaaaagatacaaaagcaacaaataaagaaaatacaaaaaaataaaccatgattataaaaagtctaacagggtaagaataatgttgggcttttttattgaaaattgttattcttagatttataataaagaaagtgtaaatatatataacaatatgaatttaaaaaataataaattaatataaaacttgaatatttattattttagggagtgtttttatgagtaatatagttaatgatttggttgaagattatataagagtgacattaaaagaaaaagaaggatttttaaaagatttagaaatttatgcagaggaaaatagtgttcctataatacataaagaagtttcagatttattaaaagtcttgttaaaggttcaaaaaccaaagagaattttagaagtaggatgtgcaattggttattcttctattttttttgcaagtattataggaaaagatgcagatataataactgttgagagaaatgaaaaaatgatagaaaaagcaaaagaaaacataaaattagctggatttgacaataacataactatactagaaggagatgcagaagaaaaacttagtcaagtccaaggtgaatttgaccttatatttatagatgcagccaaaggtcaatataagctattttttgatttagttatagataaattaaaagatgggggacttttagtatctgataatattttgtataaaggtatggttgctcatgatgattttgttgtaagaagaaaaaagactatagttaaaagaatgagaaattatttagattatatatgtaattgtgactatttaagcacatcattggtaccaataggtgatggtgtagcactaagttataaagaaagtaaaagaggtgatgtagatggaattaaataaagtagaacttttagctccagcaggtgatttggagagattgaaaatagctataacatatggagcagatgccgtttatataggtggagaaatttttggaatgaggtctgcagcgaagaattttagtaaggaagatatggcagagggagtagcttttgcacatgaaagaggcaagaaagtattcgtaacagtaaatataatacctcataatgaagattttctacaattagaagactatttgttggaactagaagagataggaatagatgcagttataatagctgacccaggagtgcttagtgtcattaaaaaagtaattccgaatatggaaatacatttaagtacacaagcaaatacaaccaattatctaagtgcaaacttctggtacgagcatggaataaaaagagttgtagtggcaagagaattatcttttgatgaaatatctgagataagagcaaaaacacctttagatatggatatagaagcgtttatgcatggtgctatgtgtatttcttattctggtagatgtttaataagcaactatatgactggaagagatgcaaacaaaggttcttgtgctcaatcttgtagatggcaatatcatttggtggaagaaaaaagacctggtgagtattttccaatatacgaagatgaaaggggtacattcttctttaactcaaaagatttatgtatgatagagtatataccagagttaatcaaatctggtataacaagtttaaaaatagaaggtagaatgaagactgcatactatgtagctactgttgtaagagcatacagaatggcaatagatgaattttacagagccccagaaaactggaagttcaatccaatgtggatggaagaactaaaaaaaggtagtcatagacattttacatcaggtttttacttgaataaaccaacaacagaagaccaaaattatcaatcagcatcatatgttagaaactatgattttataggtatagttagagaaacagaagatgaagatggtcttattgttgttgagcaaagaaataaaatgtgtgttggtgatgaaatagaagttatgggaccatataaagaaactatgtttactaaaattgaagaaatgtacaatgaagaaggagaagctatagaatcagctcctcatcctagacaaatagtgaagttaaagctatcagtaaaagttggtaaagattatatgcttagaaaagttatagaagaaaaggttgaagaataataaaaaattgataaaaatagtattagccccttagaaattgtcaataatgaaattatctaaggggtgatttcatgtcaaaaaagaagactccatttttgaaaaaagtgggaaagagaagctggtgtatatttactataattttaataatttatagtgttttaatttataggctagttgatatacaagtattaaaaggtgataaatacaaacaaagtgttgaatcacaaagcgttgagaaagtcgagttaaatagtggaagaggaataatctatgatagaaacaacaagaagcttacagatacaagtaaatctcaggtattaattgttgaaaaagaaaaattaaataataactataaaattttggaacttattaagaaagctactaagatgaatgatttagatatatataaagctgtacaagagcaattgacacgccctataatacagattcagactaaaaatatcgataagagtatgaaaaaagaacttgagaaaaatggaataatggtagaagaaaaaactatgaggtacgcaaaagatggtttattatcacatacaataggatatataaaagaagatgataaatcaggtcaatcaggaattgaaaagagtatggatagtgtacttagaaattcaaatgaaaagtatataagtgcttttaaagctggagatgcaggaaatgaaaaatctctaaacatactaaagggaagtgtaaaaactgttgataataaggataaagatagacatctaaaaactactattgattataacattcaaaaaaaattagaacaaatactaaataaagaagaaaatcctacagcagcaataatctcggaagcatctacaggtgaaattcttgcaatgtgctctagacctaattttgaccaaaatgacatatcaaaaagtttaaaaggaaaaaatggggaatttgaaaatagagttataaaagcgacatatccaccagggtctgtatttaagatggtagttttattttctgcacttgaaaatggtgttatagatgagaactatacttacaactgtacaggtaagactaaagttgggaatactaatgaaatactgcgatgtaataaaagagatggtcatggtttccaaaacttaagacaagctttttctaattcatgcaatcctgcatttttagatatagctatgaaacttggaaaagaaaagatactcaaatctgctgaaaaattacatttatttgaaaaggttgatattggtcttgatgaagaaaaaattagagaagctccaaaaaacatatcaataagaaatttagctataggtcaagaaaatatagaatttacaccacttcaaataaatcaaatgactcaaataatagctaataatggaacattcaaaccactatacttatataaaagtcttgtggacaataatatgaatacaataaaaacttataagtcttcaaaaaaagaagaacttatttctccttatgtgtgtacacaagttaaagaatatatgaagtctgtatctaggattggtacagctaaagacctaaaagatattgaaggtggttgtggagttaaaactggtacagctcaaagtagtttaaataaaaaagctatagaccacggatggataacaggattttatcctgaagaaagacctaagtatgtaataactgtgttagtagaaggaactcaaaaaggaaataaatctgcaacacctatatttaaggaaatatgtgaaagtataaaataaattatgtactataaaatttaaggatatatcgtaactttgattttagatagaaaactttgtctaatgatgtacgatatatccttttaaaatatagtattaactttcttgaacaagctctttttctagttttttaagagcttttttttcgattctagatacatatgaccttgatatatcgagtttttgtgcaatttctctttgtgtcttatagccataaggagttaacccatatcttaactggacaatttctctttctctaggagtaagaattttgtttagttgttcgtaaagttttccaacttgaacttttagttcaacttcatcaagaacatagttagcctctgtgccaagtatatctaaaagacttatttcattacacactactctttatatgttattggtattactggtcttcatgtaatttcaaatgaaccattaattcaaaagaatctagtttttgttctttagacttataataaattgctttatcaattacagattttaggagtttattttttccaagggaatctgaatcatgataaagtgataacacagttttaatatcttctattattttagaattgtcttttttaacagtactcaatctattttttactgtcttaattgaatctttaatttcttcagttcttgaacttatattgttggacctttcaataaatgtatcttcatcatatattccacgttctaataaatcatataacttatttttttgtttacctaattcttttaattcagtttctaagccctttaagactcgtttttgaaattctatattactatctttattatttttatctaagtctaaatcacatgcttttaattgatatttttttaccgtgtcttccaaagattttaaaatggcagcttcaataaattcaaatcgagaacttttattgcaaccaggatggtaacaaattatatagtcgtggtctgcatatggtctatatactaatggtctaccacaatttttgcaaatcactattcctgcaagtggattttttatttgattaccatagctgacatgaccgttttttttaagtatattttgagcttttttccatgttatttcacttattaaaggttcatgctttccttttgcttcaatccattcatctttaggtcttagcttaacagtttttattttatttggatttttagattttttatagtcctttttttgccactgaatgtagccacaatataccttattttttattatatttgtaattgcagaattgtaccaattagcacctgtagcagttttaatgcctaagttatttaggtattttgatattttactacaacccatatcttcattaatatataagtcaaagatagtcctaactacatcagcatccttatttggtacaagtattctttcttttctacctgttgttacagcatcatatccaaatggagcagaagttcctatgaaattcccttcttcaactgattttattctacctctttgcattcttcttgatataagttttaattcttttcttgccataaatgcttcaaattctgaatactcctcatcaaattcatctgttaggtcgtatgtttttctaggtgtgatgattttggttttactttctttgaatgtttctaatatgataccttggtctttcatgtctccacgaccaagtctgtctaagtccattactaagactgcatcatatttattttcttcaacttcttttagaagttcaagcattttgggtctatgtattatactttcaccagaaactaattcttcttttatctcaattacatctaagttttgttcttttgctagttttagtagggttgatttatgtctacttaaagtttcaaattcgccttgtttttctgcctcttcatcagcacgggattttcttaagtatatggcaacactcataataagtaatcacactccttatgcactattatatagtaaatcaatagagtttaaaatatagaaaataagcatgtcaaaagttaatttaactttcaacatacttattttctataatattaatgccttataatcctttaatatcatttagattagtttttgcatattcattatccgggttaagttcaagcgccttattgtaagattctctagctttattaaattctgatttactcataaaaataacacctcttaaattgtaagcatcactagcgtctattttataagcttcattatttttatctagatattctaaggatttatcaattgactttaaagcctcatcatatcgttgtaactctatataaatatatgattgtgtataatatgcaagtggatttttatcatcaatttctatagcttttttgatatcaatagcagctttattataatccttatcttcatctttttttgtttctgacctagcgattttgacataattagagctaagagctcttttaaagtctttatgccataataatttatattcattatcttcgattataaaatatctatcaaaatttgcagtatcttctttattttcagtgatatactttatagtatcagtttcttttattttaacaagatttgtgtactctttattagaatatttgtatttctctactttattttcttcaccaagtttataatcttttagggtttgaagtttaaataaagtatcttgatattcttcaaatttttctagactgacactttccttactgtctttacttaataaattatatgctacttcgtagtctttgatttctatactatcaaggtactttttagctacttctgtagcactttcttttggagcacatccaaccattgatatcataattaaaaatgatactaatattgctgttatttttttactgattatcataatataatcccccttatattgtctctcactaattttattttatcaccatattctaccaaagtcattaatttaagaatgatatttttcattaatattatattaagtaataataatttttaaaatttatggtaacattttcctgaaaagtattatataatttaggtgaaaatatttaagagaaggagatattatgaaaattaaaaaattattaacaatagggttatctttatctatatttattgctagttgccctatatctgcaaatgctcttgataaaattgaatcaattaaaggtgcagataaatacgaaactgctggtataattgcagacaaacaaaactatactacagctatattaattaatgcagacagtacaatggctgatggattaagtgcaagtggacttgcaggagctataaacgctccaattcttttgactaagaaaaataacataccaaatgctacacttaaaagattagaaaaggcaaaaaaagtatatataattggaggagaaaactctattaataaatatactgaaactgttctaaaaggcaaaggaatagagattaaaagacttcaaggtagtgatagaattaagacaagctataatgttgcaaaagaaataaattcaattaacaaagtaaataaagtcatattgactaatgcttttaaaggagagcctgatgcaatgagtgctgcacctgtagcagttagagataaagcagctatagtattaactgatggaaaaagtgttccatttaatacaactggtgtagaaagttatgtaataggtggtacttcatcaatgaatgacaaactagttaaggatactaattcaactagattaggtgggacagatagatatgatactaacaaaaagataataaataaattttatagtggagtaaaagaattttatatagcaagtggtactgatttagtgtatgctcttgttggttctaccattgctaaaaataatgctattgtgttagttggtaatgatagtaataaaagtgtattgaaaagtacaattaaattaactgctataggaaatttgagtgatagtatattacagcagtgtttaaatgtaacaaaaaatataggcgattctaatactggaagagaatatacagtagaagatgctgctaatgcagtgaaaaaactattaggtgtgaagaaattttattacgaacctaattattcagaagatgaagatttaatatttctactagataaaaattttgatttttcaggaaaagagtactatgtatttgcttacattaaacagggtgcagagggtgatgttagatactgtgtagctaaaaatgatatgagcaaagtttatacatatgatgttaatggtaatatgaaagtatgtaatccagatgattataaaaataaaggaagtataacagaggaacaagcaaaacagatagcattaaaagaatgtgctaagagacataaagtcagtatcaataacttagtagttgatatgatagattttagagatgatatatatagtggtaatgtctatgctgttaaaatcaattcaaaaaatagtaatggtacttttggttggttttttatagatatagaaactgggaaaatttataattaaaattagaacttttaaacaataattatataatttaccataatatgttataatatttttagcaagaagatttaacttacaatctatagagtggagttcatgtacaaaagattatcctcccaacgattcgaagggaggtgagttcatggataactttttgtttaatgttttagctagtttaacagctagtgtggtagtttacttaatcagtaaactattcaaaaaagcaaaaagccactctcgcatgaactatacccctcttaggagacagttgaaatatgtaaaactgtctaaaactaggagggttttgttatgtctaaaactaaagtatcatcagagcaaaaaatcgaagcaattgaatcatatttaaagggtgaaaattcagtaataaaaataatggaagaattaaatattggaaaacgtacattcagagagtggatgcgaaattatgaaacttttggaaatgatggtttaataaaacaaagtcacaaatcatgctattctaaagagtttaaattaaatgctatagaatcttatctaaatggggaaggatcttatgatactatctcaaaaaaatataaaatgagatcagttcatccactaaaagcttgggttaaagagtataatcttcataaggtgataaaagaaaccccgaagggaggactctttatggagactagaaaaacaacattagatgaaagagctgaaattgttaaagattgtattgaacatggtcttaattacaatttaatagcaaaaaaatactttgtttcatacagccaagttagaagatggactcttaaatataaagaaaatgggatagatgctttagaagaccgaagaggtaaatcaaaaaaagaagatgagttaactcaattagatgaaataaagttggaattgaaaattgtaaaagcagaaaaacacaaattacaactggagaatgaattcttaaaaaagttaaaaatcatagaaagagggtggtaattacactatccaagaatgaagataaatataaagcgattcaatccttattcaatgaaaaaaaagcttcgcttatacaattatgtgaaatcgctaaagtaaatcgttctggatactataaatggctcaatcgagataaaagtaatttagaacttgaaaacattaaattagcaactttgataactaagatatatgaagaaaagaagggagtttttggctctttaaggatgaccttgcagttaaacagagagtataaacttaatgtcaatcacaagagagtgtacagactaatgagagccgtaggcttaaggtctatttgtagaaaaaagaaatttagttatgttaaatgtacaccagaagtaattgctgaaaatgtattaaatagaaaatttagtgcagataaaacttctcaaaaatggttaacagatgtaactgaatttaaattaaccaacgggacaaaggcttatttaagtgcaattctggatttaggtgatagaagcatagtttcatatgttattggaaaatcaaataacaataacttagtattcgaaacttttaataaagcaatagaagtatatccaaatgcaaaacctatctttcatagtgatagaggctatcagtatactagcagggtgtttaaatcaaaacttttaacacaaggcatgatacaaagtatgtcgagagttggtcattgtattgacaatgctcctatggaaggattttggggaattttaaaagtggaaatgtactatttaaggaaatttgatacatacgaacaattagtcaaagcaatagatgattatatatattactataataattttagatatcaaaagagattaaattctatgtctccacttgaatttaggaaatatttaagtacagagatagcataatttattttaagtagctctaaaaaaatttaaatatctagggttttatttgatgtgctattttttagatagtaaactttaaaatatagctattaattatatgaatataataaaaaaagtactaatgattgacactagtactttataaccacttttacatgttttaactgtataaaacagtgggtatagttcagcacaaagagtgacttacgagttgaatttaaatttatatttaaatccaaaaaataaactctgtttatgatgaactccactctaacgcaaaatagattgtagttcttcttgcttttattataccacaaaacattataaataaaactgttgtttataaaaaaatgcaaagtaaaattttttataaacaatgataaaaattttattatagagctattaacttatgaaatatctgtaaatgagtagatatttcataagttaatatttattgtttgtataaaatatttggtaaaaataagtaagttttatatgttataataattgtagcaagaataataatcgaaagcagcaagcatgtcagctggtgttatatcagtttatatttatgataaaataaaaatctcccaaacgccaataaggatgatttaaaaaaataatattttcacttaaaaataatcactctttataggagtaaattattttcttgattttattatactacaaattggtacagatatttaaaaataatatattcataatattataaaattataaatagttttgcagtgagcgatatttttgataaaatagggcctaacagttgaaatataaggcattgagggtatgtgataaatgttatcatttgcactactcatggttcactgcaaatttgagagaattgtatagatgtaagtgttggaaatactcaatttattttggggttttatattaactaagtggtatgtaaagtctccatctccaattaacataaataattcatccgctggttttatattaactaagtggtatgtaaagccgcttggcaaatcataagaaggattattttctccaacgttttatattaactaagtggtatgtaaagaaaataaaagagtttgaattacccattttttcatggttttatattaactaagtggtatgtaaagtacgacattgaataaaatgggtacagagacaatttataagttttatattaactaagtggtatgtaaagtttataaatcttttaatgactgtctctgatggtacaggttttatattaactaagtggtatgtaaagaaaggaatagatgatatgattgctaatgctgaacaacaagttttatattaactaagtggtatgtaaaggggtctgactttaatatatatatatatatatataaattgttttatattaactaagtggtatgtaaagttataaactcccacgacaaaattaactataacctcgtgttttatattaactaagtggtatgtaaagagttttaaagagggcagacctaaaaaatatactaaaagttttatattaactaagtggtatgtaaaggcagaagatttagcgactgttgttgctgaatgggatggttttatattaactaagtggtatgtaaagattaaattgctcagtctagtacttaaagaattataaggttttatattaactaagtggtatgtaaagttgctatgatttaattatacgacgttttgtctttaaaggttttatattaactaagtggtatgtaaagtgctgtgccacaatttgatgcttctatagctaaattcgttttatattaactaagtggtatgtaaagcttttaagtgcatcaaaggagttacaagctatatttagttttatattaactaagtggtatgtaaagacagatctaatatcaaaataaggttatgacttttaaaagcatagccatatcagtaaaaatttaattatcatttaaaaaataaatttttatttaaagaatacacataaatatttccagacttaactctcttaaaccattttcatatcctttagtagatacttttgttattttttaatctttagtaacttattcttgagtgaatctcttattttttctaagctatttcaagcttctcaaaaaattctatatttatattcatcacacatataatacaatcaattcagttttaattgccaatatttagtttttctgtatctgataaaccaagaacataatcagtatataaaccaaaaattttagcaaatattattaacccatcgtctcttgttggtctttcaccagattctattcataacacttgtatttatatttgttttttcaagcaattctttttgagaactattcatattttccctagtatatttaattctttgatttacatctatacataattacctcgaaaaatttctgttttggaaatattgttattgaaatatagcaattaaggtgaatatatgaaaaagatacactatgattttataaaaaagaagacatacataaaatttatacttacaaagtgttgcaaaagagttaggttttaaaaatgcatcaacttattttaagtacaggaaggggtaatattcaattagagttgatatgttacctataaactatctaagatacttgattatgatatagaaaatttttttacaaattaaatttctaagatagaaatttaattaagaggatgatgaggatgaataatttacaagtaatataaagaaataataagagaattttaaatgcatagcaactagcagatatatatgaaaatgatgtaaacaatatataaactaacttcaatagaaataaagagaatgtaaattatgttttattacaattcgagtatttgaaagaatttaagaactaacctactaatagtcagttgatttcaaaacattctagtcaattatacctttggatcgaaagatgtgcaaatagacactgcaaaatattagatattgataaaacttgggaacaatttgacaatttagagaaaatatatttcaagattaagcgagagaaactaagctgtatagaagatgtattaatagaaaatttaagatttaaggatacaaattaataaagcaataatatggcattagatgtaaaaatagaagttaaaataataaaagatgttgttatattaaatataatacattggaaaaaagaaacaagtctattaacagttaaaattgctagaggtcaaggtgatttaagttatgtaaaatattttactaatgagagctaagagcttcttaacaagagttttggtgtgtctcttgaaacaatgttaacaattaataaaagacgaatggcagaagaaggcgtatgtaagtttaaaagagataagttaaacaaactagatactatataagaggataagaaacttatagaagaatatgttacttttgtaaaggatttagctttaaaatatagaatataaagtgattttaagtaaaaattgtaacaattaaataagtataagacaagtttatgagttcatattttataacaaggggtgatgttatgaaaatactacaacaatttaaaccatacaaatatgataaagaaaaaaatatagaatatgatgaaaaaattatagctaatcaaaacacagaagtttatatagtatatccacgtatatctgatgaagaaaataggagaagatgggaagagttcaatgaagtagctaaagaagtagctattaatatagctatgaagaaagttgagacagtagaaagttaagagaatagagaagttgctaatacttagcactttctcatagaagaaaattggacaactatttttaaataattaggaataaaaaagttaaatcatatttgaaaaaaggcgataaaattgttgagtattgttattagtaataagaatgtattaaaagaaattataagtttttagtaaatatagtatttaaggatattaaaactggtaaaaaatatcatttagactattaaataaaaaagtgctggtcaaagtaagcaacacaataaataaaaaaacttatagaaattataagataaaaagatgagatttgaaatggttgaagttaatataaaaattaaaggtgaagtaagtgaaataattgactcaattagaggtatatttaatagctttgatgaagagttaatattagatataaaatcagagtaagaatataaaggtagatacgtagaaagttataagtaattcaagacttaaattaatttctagtttttttaatgcaaaaatttaataaatttcaaaatataataattctgacatctaaaaagagctattaaaaatgaataatattgactattaagatatgaatagtgtacatatattaaattaagatatcaagtaggttaattttatataatgatggggctcaaattgaagaggcgatataaaaatgtattaatatatataaatataagaactataatacatattaactgtaaaattaaatttatagagttatatttaacatttaatgaactgaaaaataaattagcaaataatgaaaaaacaacagtaataaatgagaataacaaagcattctcaggattagtggatttttctaattgagctttaatcctagtttgttcaatttcgatatttctaatattattagtattatcaatttatttgtaataattatcaatttttgcgaaatatttttgataatttatagaactttatatattttccttaaagtatttttagcccttattgtttggtttccaattttaaaactcataaactcccaataaattcatgtataatataccttaatttataatatatttaagagtttatttcagtaatttttcgaacgattttgatatatttcatttatagttttcaaaaacttatacaaaaaagagtgtttcatttttctaaacactctttttataagaatttgaataataattttttaaaaattgataatatggttatttctttttcaagtttatagtttcctcatttccattccaagatataattagcttgtaactagattctctatttgaataaagacctggtctttgtatttttattgctttttcttgacctgcttctaaaatttcattttttacaactacaactgcatcttcaccatctataaattgataggaataattaaatttttgttcaactacatctttactatttttatattttatttctaattttgagtgtccttcagtagttacaaatttagctttccaattttctgattctccaataaagacatttttatcattttttatattaagtatagctatcacagagattattaaaactataagaatacctataaaaaattttttcctcatatcaatccctcctttgaataattataacatgagaatagttattcaatactaattttaaaaatattgtggatttatattctattacaatagaatgtctgttataacaaataaaaagtaaggattaatatgaattataggttaaaaaaatctgtaacaactattttatctttactcataatgacaatactattaccaacaaatgcaagtgctagtaaggtagaagattcatctatgaaagtaatgtattcagagaaacaagtaacagacatggacaaattatacgatatggctaaaaatggaattactgatgttaaaagttccaatgaaaaaggtataatcaaaaatgcaagaacaggagagtccatatacgttgattctatatcaacaactcaattattagaagttaaacaatctaaaaatttaacatcaaagatatattctaagacagtttttttgatactaatacaataaagcctcttagaaaagcaagtatatcagaagatggatgggataaaactggtggtgtaaaagcatctggtacagttacatatacaatatcaaaaggagatggagcatttcaatatatttccgttagtaaagtttctggaaactggtctattgcagacggccagattcgtgtaacaaatagaagggtgcatataaatcaaactggatttatttctaatgggctaggaattaagcagcaacaaaagaaagagccaacatcaaattctttctcatataatgcaccttctagttggaaaccagtaggtagagattcagttcaatacaattgtgggtttgaattaattgcaacattagtaagagaaggaagttcttgggcattcaatttcattgttcaaccttaaaatattttaagtgaattttattaaaatcaaagatatacatatactttaaaattagagaatgtaaattaatttgtgtttttaaagataattcctacgttatagtaacaattgcttatttactattaatatttcttaatatatgaattttattttaacaaattataaaaaatgtatattgagatgtttttaaatatttttggaaattatatatattataacaattatagcaaatttttagggtataatttttaaaattatattctactatcaaaagatatgaataaatgattgtatatattatatcaatttttatatttcatagtccattttttcatcacattttcgcttgtcaagaataatatctttaagagtgaagcgtttgatgtaaatctggactttgtttttgagacatttttgaaatatttattaaatccttcgattatacttgtaatatatattatagatattacttattttagtaaaactaaaggctgatgctacaacattccagttatttccaaacgttttaatttctgaagtatactgtttacattatttttaatctattttatctaaagtcgataaggctttttattcattaactgacctatatacagatttaaaatcacttattaattcttttgagtccttgtatgaaacatatttaaagtatttcttatctaatgtattaaacatttttgtattacagaatgaggataacttgtagctattgtctctttgaaataagtcatctgtatttactcctaaaactacttatatctgtagattttataagttctccatcttatataatttctttgattaattgttttcttaaattattcataaaaaaatctccgttacgatatttgattatatttaaatcattgccataaagaagacttttattaactttgaaaaacaaattattttacattactggtgattagttgctactttcttttgatattaattctattagattttatatagttatatatctctttctaactaagtaatataatattactgttatagtagctactaatattattgctattattgtaatatctaatcttcttgtaaataagcctattgatatatactcaagacctgttacatagcgataaagtacttctagtttaacagtttttttcttatctatatttccatatattgattctaatttattaaaatattttttactacaaaaagcagttttaggtttaattaaatatattattgtagttcctattataactattattccaataagtataagattgatatttccaaaatccatagcagatacctcctgttaaatttacttttcttaatcaaagtatatcagtaacacaagtataaagagtatctaaaatattacaaatattaaatgagaaaaagatggtaggttaaccccaccatcttattttttatctattaataaatgatgctacaaaagttagtataaaaaatgaaacaaacaatataatgaacttgtgtaatttacttagttgaaatactttattacaaaagaataaaactagtgctgagataattgcaaaaagtagatattttataatcattttatcacctattgatttcttacagattgtaagtaatatttggttacataagccccacctttattataacgcatttttttaaatttaaagatttttccagatgttatatttgaaccaagatgcattgtaattgctccaactatagcagctgcaagatactgtcctataccaggaatggcaccagccaaaagccctgcaacccctgtaccagcaccagctaaagttaatgcaactcctttagaaagatataaatcaaagcctgtcttagtccaaactattttatttgttccagcttttctataatataattcattttcaataagagtagtgtcgataccattttccttaaggtttttaattagcttattaatatctatgtatgtaactgtacctggtttaggtaattgagagtcattgatttccaagtcttctattgttgttggattgttttctatataacttgggacgttatttgaaatttccattgcattggctgtttgtccaataggtatacctataagagctgctaataatgctactgataacaatttcttaatctttggatttcttagtttcataaaatacctccattttaaattagttatatatcaaagatatatattattattgtagaatataattcttaagaattaactacattaaatattaataaaaaatatagtaaaacttaagaatacatataataaaacttaatataaattaagtatatgaaataaatatcctgtatttaagcttatagattataatgaaatataatacatattataataataaaacgaactaaaattatcacactaaagcataaaacatactctaatcatgttagataaatttttgaatatataatccaaaagtactctctaaagtagagtacttcttttttattaattatttttatatggaataaattggaatattatatttgttccaatctgattgattacatactattattagtataaaatttaattatacataaattggtaagaggtgtaaactaatgaagattaataaattaccacatgcagaactaaaactaatgaagtatatttggggagcagatgatgtattagcctcaagagatatcatagaagcaatgaagttgaaatacgattggaaaaagagcacaacattgacatttttaaaaactttagtagataagggatttttaactacttattaaggtagatagatgtacgcattatactatagctataaaagagaaagattacttaaaagttgagacaaagagtttttttagttttatgcataacaattcatttaagagttttatttcagcactacatgatgatgaagttttagatagtaagagcttggacaaattagaagaatactttaaaaatttgaaagaagaagatattgatgactaataaagctatcagtatctttttagtttgagacaattgagagtagcgtttggatttaatgttagttttatgtgatggtaaaacattatataaagaaaagtgattatttccttagtgtttgatagtaaaaaatatagagaataataccaattaaaatttaaagatatatgaaatactacaatagcttaaatcatgtaaatatgataaagatattgaaattataaaaggaatataattttagaagaaatagttgacagataaattaccttactatattattgtattaataaaataatacaataatatagtaaggaggtaataaatgaaatctagaaaacataatattacaaaaggattatttatagtttacataattattttaacatggataatactatttaagttgcaatttgatatctcatctcttgaaaccatgaatcttagaagcataaacttagtaccttttgctgggtcacttataattaataatagagtagatatatcagagattatattaaatgtggctatatttgtaccatttgggatatatgtgtgtatgctaaaagaagaatggagctttataaaaaaagttatacctatttttataactagtttagcatttgaaacacttcagtatatatttgcactaggtgcaagtgatataaccgatttgataggaaacacactaggaggaatcataggaatagctgtttttatgctattatcgaaaatatttaagaataataccataaaaattatcaatgtattggcattgattgtgacaattattgttgtattatttttaggattagttatttttgcaaacttatagaaataagtatataggtttagcttaaaatagaacgtaagatacagttacatataaaattatttacacataaaaagcacctatataggtgctttcctaaattattaaagaattattgtatcttgaaactctcgtatgttcaattcttgattttctcttgttttttctaataaatctaatgcacaatttatacaaactttaatttctgcattggtatttttctcataataagttatatatttatttctatatttatctatttcttttccacaacgactacacattacaattacgctcatatcttagttcctccatctctaattattcttaatatattcaatagtatcacttttctgaaaataatgattgttaaaactgtatcaaatttagatttactttttattataatgcattttaataaaaaaataaaggttatgggtaaaatatttatagaaaaaagtatattattgaatagattataaaattttattatttttcatcagtcttaaatacacattaatatctataaaatgacaaaataaaaaatactatttaaatagagattaaaaaattgatgcgaagtatttgtttgctatatgaataacaatttatttagaagttttgatttgacactgtataataataaagtaattgctaaaaaagtttgatgatttggatgtatttttagaaattagaaaaatatatacttactgactaatgataatcttatatatattttagtttgagtgatttaagaaaagtgttttgaaaggggattattttatagaataaatatatatatatagtagaaaattacatataaagagtagtatttatttcattaccttctttatctgttccgatggggtcttgtagagatacttgagttttattttttttgttagatctaatattcattaaaatctcattttcaatacatctagaagcatatgttgctaatcgagttcccttatctatgttataagtttctatagctttaattaatcctattgtacctatggatattaaatcatcctgatcttccgttgaattattatatttctttgctatataagctactaatctcatgtttctttcaattaatgtatcttttgcacttttatcgttttctattttaaatttagttaaatactcaatctcttcttcaggggttaagggtttttcaaaagatttaagagctgccaataggtcacccccttttcaacggtcactttaaattatatgaaggagacttatccaagttgactgttatctaataaaataatatgcatatttttagaatttaaaacatatatttgcaaacttttgaatggaatatgacataaagagtgggaatttaaatttaagtttttgttgtatatatatgaaacaaggcgaagaaattattgatttataaagtataaattggaattgaggtgtcaataaatataaaaggaaatagtatttatatatgttttggtgttgaggtaaaagattaatgcaaagcattagagtctataaaaatatgaatataggaggtgtaattttacaatacttaaaaaagtaaatgtaattaattgtttgtataaagttgattacaagcaaaaagtatcagtcatagttaattctgttaaggatgaaggtggtgtgttaatttatatatgtatgggaagaaattttgattacaatgaaaaaacttacaaaagatatttatgaaaaaacttatagttaaatgtttatatataaaatattatttaggggttgtttttattattgaaaataagaaagagtggttttatatcaatcgaatgtataataagtattgctatattatatgtggctgtttatttagtttctacatcattgtataattgttatagttttatcagtagaaatatatctgacagagaaatgttaagtacagcaaaaaaatatatagaagatgagaagtatagaatacaaaatagtaagtatgagttaattgaagataagatagaaaaaaattacataaatggatatgaaattaacagtagaatagagcaaattttagattattatcaatgctatgaaataaatatagagataaaaaatgaatttaaaaaactgaggtttaatagctatgttactagaaaataaaggctctatattaataataacattgataatattttctattataagtactgtgtgcattatgtgtataggtttaatttatacacataataatatgtttgagttaggatacaaggacattcaactaaaagaaatttctttaagtggaatagaaatatcagtaagtaatgtactttcttgtgttgaggaagctattgatgtatctaataatgaagacgaatttagagaatatttcttaggaaataatatgattgaatgtataaaaaaaataaaagatacatcttatagtagtttagaagaactttctttaaaagtagaaaataatactatttatgacagaggagatttttttgaatttgatatagaaagtaatgttagagaaaaagaatttttaaaagcaataaaagtaagagtgaaaatcaaaaatccatggataggaattgacattgaagattatatggataaatctaataacaataaaattgatgacaaaacattcaataattataaagcatctgaaaataatgaaattctaaatcaatttaaaaatgaaagtgaaaatataaggaatcaagaggttgttgaatttacagaagaagatgaagaatatgaagaagaacttaaacaaaacataattgaaaatataaagaagaattttgatgaaaaaaaactagtacaggtatataagtataggggtgtataactttgaaaaaagaaggaatgtgactgtaatagaattaatagtatctatcagtataatactcttgatagttacattatcttttccaaaagataatcttgaaaatcataaaataaatttatttgcacgtcaactttgttcagatataaggtatgttaggcgaattaatatgtttagcaactacaatacatatatatattatataaatcaaggtaaacacgaaggttatgtattgagaaaagatggtaaaaacattaaatcaataatgctacctaaaaatgcaaaaatagctagaagtattgaaataataaagtttaaatctgatgggtcgcctcaaaaggcgtctacaatagagatatataataatagattaagaaaaactataacaataacacctgtaagtggaagagtacttctgaaagagggaaaatatgaaacataaatatggttacttgcttttggaaagtgtagtatcattgtcttcaatggtgataattatactagttttatattctatatttttgtctacaataaacttaaagttaaaagtagaagataagatagaactacaacaacaaagtcttgaaatcataaaatctatggaaggaattattagcaattctatgggaataatgaatgtatctaattatgaagaaacatttaaaaagacaacgtctataaaatgtagatatgtagatgaaaataataatgaagaaagcataagtaataaagaaattatattgaatgaaagacgaaataagttatttgtaaattctttaaatggcgaaagtagtcaagcaggtggttatgaaattggagattatgtagatgagatgtatgtattaattactaataatggtcaatatgttaatattaaattgaaattatcaaaacgtagtcaaaaatatgagactgatttcaaaataaaagtatggaattttagtgaaagtatataaaaatacataaatttaagataaagaaatgacatcaataagtcatataaaatataattattgagaactatataactaaataatatcaatatgtaaagtgtatagattaagaatatagaggataataataaaaatatagaataagtaatttgccaaatacttgtttatattgtataacttatgatattatgatattagtaaaaatttgtaatcctgacttgacagaattcaagtaagagatataattttaaaggcatagtaatgtaaaatttactaaaaaataagaaatttattttaatatggaggaacaaaaaatggtatcagcaggtgattttagaaaaggtgttacatttgaaaaagatggacaaccatgtttagtagttgattttcaacacgttaagccaggtaaaggagctgctttcgttagaactaaatacaaaaacttaaaaacaggagctataagagaagaaagtttcaatccaagtgaaaaattccctaaggctgttatagatacaagacaaatgcaatatctatacaatgatggtgagttatattattttatggatcaagaaaattttgaacaaataccattaaactatgagcaagttgaagatgcaattaagttcttaaaagaaaatgaagttgctacaataagattttaccaaggacaaccattccaagtggaagcgccaaactttgcagagctagaagttacagatacagagccaggtataaaaggtgatacagcaagtaatgtaactaaagcagctacagttgaaactggagcagttgttcaagttccattatttataaatactggagataaagtaaagatagatactagaacaggtgaatatttatcaagagtataaaaatttatgtatataaaagcttatatgtcttaataatataagatatatgagcttttagtttatatataaaaaagaaagcgaggggtgttacatgaaacatttatatgaagaagttgcatacttaaaaggcctagcagaaggactagaaataagtgctgaaagtaaagaagggaaaatgatacataaaatagttgatgcattagaagtatttgcagatgctattgtaacattggatgaagaacaagaagaacttcaagattttgttgaatctatagatgaagatttagcagatttagaagaagatattgctgacatggaagaagatctttatgaagaagatgacgatgaggatgatgaggacttcagctatatagaaatggaatgcccaaattgtggagagttagtagaaatagacgaagatttgttatatgatgatgaagtagatgttgtttgtcctgattgtaaggctgtgatattatcatcagaagatgattgtgatgatgattgtacatgtggtggttgtccaagttgtgatgatagagagtaaaaattcataagaattaaaactgcctatgatgcctatgagatattttgcttcataggtagttttatttttatgaggaagggtattatgtattttggttttgcaatacttggacaaaaatagtacactagaatttatagaataggattttggagggatgtaaatatgaaaataagtaaaaaattactagataatatacaaagatttgaaaatgttataaattataaatttaaaaataaagaatatatactagaagctcttactcatagttcatattctaatgaaaataaaaaatataattttaacgaaaggttggaatttttaggggattcggttttaggcatagtgataagtgattatttatttaatgaagaagctaatctgcccgaaggggaactaactaaacttagagcaaatatagtttgtgaagattcgttaagtgaagtagctaatgatataaatttaggtattcatatgttattaggtagaggagaagaagcaacaggaggaagacataggacttcaatattagcagacgcatttgaagctgtaatagctgctatatatcttgatggaggttttgaaagtgcaagacagtttatacttcatcatatggaaaatataatttatgattcaagaaaaggaaatatatttagagactacaaaacgcatcttcaagaagtgttacaagggaatggagaaaataatatctggtacaggcttatagaagaaaaaggaccagaccataataaaagatttgtaatggaagttggaattaatgacgatgtattgggtataggagaaggaaagagtaaaaaagaagctgaacagttagctgctaaaatagctttaaagaaaaaattatgggaaaaataaatataatatgtaaaaatataaaaagaaatatttatattagaaggatgttgtagatgaaaaagagaattatacctatatttgttcctcacaaaggatgtcctcatgattgcatattttgtaatcaaaaaaaaataacaggtgtgagtactgatgttactagtgaagatgcaagaaatataattgaggaatgtttagagactatagataaagatgcagatgtagaaatagcattttttggtggtagctttactgctatagatattgatatacaaaaaagtttattatcagttgctaaagaatatgtagaaaaaggtcttgtaaaagatattagaatgtctacaagaccagattgtattgatgaagatatattaagtatgctaaaagaatataagacaagtataattgaactaggagtacaatccttagatgaaaaagtattattagatagtataagaggtcatcaatctgaaattgtatacaagagttcaaagatgataaaaaatagtggaatcaaacttggattacagatgatgattggtcttccagctgacacagaagaaaagtgtatatttacagcaaaaaaatttgtagagctaaaaccagattgtgttagagtctatccaactttggtagtaaaagatacaggtcttgaaaagttaatggaacaaaataaatataatccatttactcttgaagagagtgtaaatatagtaaaaaaagttcttgtactgttttatgttaataatatcaatgtaataagagttgggcttcaagctactgatgatatacaaattggaaaagctgttttagcaggaccatatcatcctgcatttagagagttggtagaagcagatatgataaaagattatttagaatttgttattttgcaaaataaaaatataaagcaaatgttggtcaaatctaataaaaagaatatttctaaaatcataggaaataaaaaaacaaatgttaaatatatggaagaaaaatttggtgtgcttttaaaaacacaagaatccgatttagatataaatcaattagaaattgtgttagatgggaaaagtttaattagtgctaatatgagagacattcatagaaaattgtatgacatttatgacctttagttttaataatgaagggagagaaaagatttgtatttaaaaagactagagttaaagggatttaaatcctttccagtaaaaacagatattatttttaaagaaggaataacagccatagtaggaccaaatgggagtggaaaaagtaatatatctgatgctgtaagatgggtattaggagaacagagtattaagagtcttagaggtgataaactcgaagatgtaatatttgcaggtacagatacaaaaaaacctatgaattattgtgaagtggctcttactattgataattctgaaaatcaattggaattagattttacagaagtaactataagaagaagggcttatagaaatggtgaaagtgaattttttctaaataataaaagttgtagattaaaagatataaaagaagtctttttagatactggtattggaaaagatggttattcaatcatagaacaaggaaaagtagatgaaatattaagtaataatcctttaagcagaagaaaagtttttgatgaagcttgtggcatatcaaaatatagatataaaaaacaggaagcagaaaggaatttaagtaatacaaaggaaaatttagaaagaatagatgatgtatatatagaaattgaaaatcaattaaagcctctttttaatcaacagacaaaggcaaaaaagtacttggaaataagtgaaaaattaaagatacttgaagtaaatagctttataagagaaattgaaggaatagaaaaagaattaagtgaggttaatgaacatcgtaaggttattgaaaaggagctcaatgaaaaagaagaacaaaaaaatgttgtagagaaaaagcaagaagatattaataaagaggtagaggtattacaagatgtaattgaaaaatctgtagattatataaattcaattaaaggagttatatcaaaaaaagagtcccaaataaatttaattaaggaaagaataagaaattttacgaatgaaattagtagaaaaaatttagaaataaatgatataaaagagaagctaaatgaaaataagcaatacataaaagaattagaaagtaataaattatcaggtagtgaagaactatctaccttgcaggaaaatataaaagtattggaggcaagtaaagataaacaaaaaattaagttagaatccctaaataatgagatagaattattgaaagaaagtataattgatatattaaataagaaacaagagtttagtaataagctgtccactttaaacgcaaataaagaaaatatgaatatcagagatgaaaatataaattcagagataacagagttaaacaaaaatattgaaataaaatcatctgaattagatactataaataaagaatttaatatgcaaaatgaaaatttaaagaatgtaaataatagacataaagaattatcaattaatttgcaggattcaattagtgaacacaataaactagaagatgaaatacagaaaagtaaatataatttaaatggatataattcaaagttaaatgtctatatagatatggaaaatcattatgaaggatttaatagaggagtaaaagaagtactaaaaaataaaaatttaaaaggagttcatggagcattaggacaaattataaatgtacctgaaaaatatgagaaatctatagaagcagctcttggtgcttatatgcaaaatataataactgataatgagtttagtgctaagtctgcaataaactatctaaaacagaataatttaggtagagtaacatttcttccattaaatataattaaatcaaataaagtaagtctaggaaatttaaaagcaaatactaagttcataggaatagcaagtgatttaattacatttgatgaaaagtatagaaatataattgaaaatatacttggaagaacaatacttataaataatatagatgagggcataaaatttgcaaaagaaactggtcataggtttaaaatagtaactttagatggtgaaatcttaaatccaggaggttctttgactgggggaagtctaaaaactaatgggaatatactatcgagaaaaagatacattaatgaatatacagaaaagataagtaatatcaagaatgaaatttcacatctagaattaaaaagagaatctttagacaaagatgtgaaaaatatcaaaaatgaaattgattcacatgaaagtaaaataaaagatttagaaaaaagtataataataaaaagtacaagtataaagaatgttgaatctgaaattgaatcgttaaaaggtagtattactaaattagaaaatgagaagaatgatttaaattctaatctaaattatacacttgaaaaaagcgatgatgttagaaaagatatggaagagttagatgatttatacaataaaaataaagaaaaaattgatgcattgaatgaggaaataaaaagatacaatgatttatatgataaagaaaaatctgaatttgatgaattgaacttaagtttagtgaagaaaacagaagcttataatagtatagttagagatataaaaagaatatctggtgaaaattgtgagctagaagaaaagaataaacaattagaagagtcattaaattatgaagaacatgaaataattaaattacaagattctatagccactgaagaaaaagaaaaagaaaatttaacaaaacaactaggggatagtaatagaaatcttgaaactagaaaaatagcaaaagatgatttaaaaaatagttttgatgaaattaataaagaattaaaaactatagatagacagcatatagagcttaaagaaagtttatttaaagttggtggaagattagaaagattaaaaactagtcaagacacatatataaataagttgtttgagcaatatgatatgactttagtacaagcattggaaattaaagatgaagatttggatatagatagaaaattcttagaaagtctaaagagagaaataagaagtcttggaaatataaatataggctctataaaggaatatgaggaaataaaagaaagatacgatttttatagcgaacaaaagcaagatttagaagagtctatggaagagatagaaaaacttatacacactttagaagaaaatatgaaatctgaatttgaaattaagtttgaagaaataagtaaaaattttaaatatgtatataagagattatttggtggaggttgtggagaattaactattttagataaagaaaatttattagaaagtgatatactaataacagctcaacctccagggaaaaaaatgaaaaatttaaatctattatctggtggagagaaagctttaacagcaataagtatattatttgctatattgattacaaagccaacaccattttgtatattagatgagattgaagcgccacttgatgatgcaaatatatttagatttggagaatttttgaaggatttatctaaagagactcaatttatatcagtaactcataggagaggaactatggaagctgctgattatatctatggagttacaatgcaagaaaaagccatttcaaaagttattagcttaaaattaaaagaagctcaggaaataacagatattatataacttagattgacataggaggaataacagtgttaaaaaaattatttggttttggaaaagacaaggaaaaagaaatagaaaaaaaagatgctgaagaagaaatagaagttgaagacagtgttgatagtttagaaaacttggaagaaaccattttttcaggacttgaagaagaagtgatagataaagtggaagatattgaagaaaaaactgaggaaagtgtcaataatgaaggcactgaagaaatcgaaaattttgaaaaaatagaagttgagatggatagtaatgcaaaagaagtagaaaatatttcaaataatgattctcaagaagagataatcgaagaattagaaaattatgatgaaattgagtctaaagagatagaagataaagaagataagaaagttaacttgtttgaaagactaaaacaaggattgacaaaagcaaagcaaggaataactgatagaatagatgaagttttaaaatcatatacaaaaatagatgaagaattacttgaagatttagaggaaattttaataacagcagatgttggtgtaaatacaactatggatataattgaaagactaagagataaaataaagcaaaaaggtattactgaaccaataaaggtaagagaagaacttaaatctatagttgaagatattcttacaaatgaaaactctacactagatatagaaccagcaccatgtataatattaatggtgggtgtaaatggggtcggtaagactactacaataggtaaactagcaaatagatacaaaaaagatggtaaaaaagttttattagcagcagcagatacatttagagcagcagcaacagagcaattagaaatttgggcaaatagaaccaatgtagacataataaaacatcaagagggagcagaccctggagctgtagtatttgatgctataaaagctgcaaaagctagaaaaacagatgtattaatatgtgatacagcaggaagattacacaataaggctaatcttatgaatgaacttggaaaagtatttaaaatagtagatagagaatttccagaagcaaaacgtgaagtacttcttgtggtggatgctacaacaggtcaaaatgcagttgttcaagcaaagacatttaaagaagttgcagatataacaggtatagtacttacaaaacttgatggaactgcaaaaggtggagtagtccttgcagtaaaatcagaagtagatgtacctgtaaaacttattggagttggagaaagtgtagaagacctacaagatttcaatgcaaaatcattttcagatgcattatttggtaactaatgttcttttaaaaataatggttgacaagagtgttgttatgatataaaatacaatagtgtaaagtaaataacctttacagtatactgctaggaagtgtaagatatgaatatagaaaaaatggtcgaaattggattgttatttgaacagtataaagaattattaactgacaagcagaaagaaatagttgctctatactatgaagaagattattctttaggtgaaattagtgaaaatctgaatgtatcaagacaaggtgtttatgataccttaaagcgttcagaaaaaatactaagagattatgaagaaaagttacacttagtatcaaagattcaagagcaggaaaaaaatattaagattataaaagataaaattattgacattaaagaagatttattgcacaatagagattgtgctaatttaatccctaagctagaaaatatagaagatgtatgtagggagatgataaaatgatatttgaaggattgtctgataaactacaaggggcatttagtaagttaaaatctaaaggaaaacttacagaagtagatgtaaaaaatgctatgagagaagttaaacttgctcttcttgaggcagatgttaactttaaagtagttaaagatttcataaaaaaagttcaagagagatgtgttggacaagaagttatgcaaagcttaactccagctcagcatgtaatcaaaattgtaaatgaagagcttacaagtttaatgggagatgtacaaagtaaagtaatgatttcctcaaagcctcctacaattttaatgatggttggattgcaaggtgcaggtaagactactacagcaggaaaacttggaggatattttaaaaagcaaggtaaaaaacctctattagtagcttgtgatatttatagaccggcagctataaagcaacttcaagttgttggagaaaaattggatatacctgtattcaatatgggagataaagaaaatccagtaaatattgcgaaagcaggtttaagccatgcgattaaaaatgctaatgatttagttattatagatacagctggtagacttcatatagatgaagtacttatggctgagttaaagtctattaaatcagaagttaagccacatgagatacttttggttgtagattctatgacaggtcaagatgctgtaaatgttgcagaaagcttcaatgaggcacttggtgttgatggagtagtattaactaaattggatggagatactagaggtggtgctgcactttcaataagagcagttacacaaaagcctataaaatttatggggatgggagaaaagctagatgatatagaacctttccacccagatagaatggcatcaagaatattaggtatgggagatgtcttaagtttaatagaaaaagcacaagaaaatatagacttagagaaagctaaagaattagagcaaaaaattaaaaaacaagagcttgattttgaagatttcttacaacaaatggaacaaatacaaaatatgggacctcttgacaagatacttggtatgatacctggtatgggaaatgtaaaagaccaacttggagatgtagatttgaatggcaaagaaatgaagagaacaaaagccataattcagtcaatgactacatatgagagaagaaacccaggagtattaaatgcttcaagaaagaaaagaatagctaagggcagtggaactagtgtacaagatgtaaatagacttataaaacaacttaatgaaatgaaaaaaatgatgaagatgtttgctggttcacaaaagagtatgaagaaaaggggcggcttaggcggtttacctttttttaaataaaatataaaaaagtaaaaattattcggaggtgactgtaatggcagttaaaataagattaaaaagaatgggagctaacaaaaaacctttctacagaatagtagtagctgattcaagagctccaagagatggaaaatttatagaagaaataggatactataatccaatttctgaacctaaacaagtaagaataaatgatgaaaaagctataaaatggttagctactggtgctcagccaacagaagtagttaaaaaattacttgtaaaaaacggagtaatagaaaaattcgaagcttctaaacaagcaaaataattttttcttggcaattagtttaagtaagggctcattgctaaggttactttaggagatgaaatatatgaaagagctagttgtagatatagctaaggctctagttgataatcctgactcagttgttgttgaggaatttgaagataatgatggtatcgtcttaaagcttacagttgctcaagaggatatgggtaaggttattgggaagcagggaagaatagctaaagctataagaactgtcgtaagatctgttgcaaatagagaaaatataaaagtttctcttgagatagtataaaataggaggattaggtataatgcctagtcctttttatataaatgcgtagtttaagattttatgatgatatgaccacataagattaaattttttaagaaggtgataacatgaaagaaaaattaactcattttaaggtaggtcaaatagtaaatacacaaggtttaaaaggtgaagtaagagtttatccacttactgatgatatagagaggtttgatgaattaaaagatttctatctgggaaaagatttaaataataaattggctgttgaaaaagtaagatacaaaggttctatggttataatgaagataaaaggcatagacagcatagagaaagcagaaaaactaaaaaataaatttatgtatgtatctagagaagatagcagagagcttgaagaaggcgaattttttatagcagatatgattggaatggaagttttaactgtagatggaaaatatgtaggaatactagaagatgttcttcaatactcagcaaatgatgtttatgtagtaaaaggtgaagaagataaagaatttatgataccagctataaaaaaatttgtacctacaatagatattgatgaaagaaaaatgattatagaccctattaagggaatgatagattaggtggtaatatgagatttcatataatgacactttttccagaaatatttaattcgtacatggatgaaagtataatgaagagagcagttgaaaaaggtataattgaggtttatatatataatataagggatttttctaataataaacataaaaaagtagatgattatccatttggaggaggagtggggatggtaatgactcctcaacctatatatgacacatataagcatataataacaactcacaatataagtaatccaagtgtaatttatcttactccaaaaggtaaggtatacaatcaatctatagcaaagcagatgtctttaaaagaagatataatactattatgtggccattatgaaggagtagatgagagaatcattgatttaatagttactgatgaaatttcaattggagattatgtattaactgggggagagctcccagcacttataatgatagattctatatcaagattaataccaggtgtattaaaccaagaagaatcatttgaagaagaatcatttaaagataacttattggaatatcctcattacactagacctagagattttgaaggattaaaagtaccagaagtgcttttatcagggaatcataaaaagatagatgagtggagaagagaagaatctataaggataaccaaagaaagacgatttgatttatataaaaagtctaatgaaaaataaaaatataatgaaaaattaatatatatgtatacaataaagtacctataaatggaattaaaaacataaaagtgcttgtaataactattgaagtatagtataatataaaatgttgaaaatacgggcgttcctctgtttacactggtcgggtagttaagaacgtctatgatatctaggaggaagaaagatgaatgaaatgctaagagcaattgagcaagaacaattaaaaaatgaagttcctaattttggacctggggacacagttaaagtacacgttagaattatagaaggaaaaagagaaagaatacaagtattcgaaggtgtagtattaaagagacaaggtggaggagcaagagaaactttcacagttagaaaaatgtctttcaatgttggtgtagaaagaactttcccagttcactctccaaaaatagaaaaaatagaagttactagaaaaggtaaagtaagaagagctaaactaaactacttaagaggtagagtaggtaaagctgctaagataaaagaagctagaaataaataattaaaaactttacttataaatggggggctgatttatcagtcctctttctattttaatgaaaattacagcaaataattatactagaaataaatagaaatatttgttgaaaatatacattatttatctatgaatttatagcttttaaaatgaaaaataaaattggtaaatattggattatattttgtaacgatattaaaaataagagaacagtattatgtaaagtatgacgttaaaaagatgacaatattatagtttgtgaagatagattttttaagtggaattagaatataataatataatattaataaggagtgatacatgtgtcaaatgaatacgaagagtatcttatggatgacaatctacatataaactggtatccaggtcatatgaaaaaaactaaggagttagtaaaaaataacttaaaattgattgatgtagtaattgaacttttggatgctagaatcccgtttagtagtaaaaatccagacatagacaggcttgtaggagataagccaagagttgtcgtacttaataagagtgatatggcagatagggataaattgaatcaatggattgaatactataagaaaattaatatcaaagctataccagtagatacaataaaaggtgttggtataaataatataatcgaagaatgtaaaaatgtaactagagaaaaaatgagttctttaaaagacaaagggagaaaagaaagagctatacgaataatgatagttggagttccaaacgttggtaaatcgtctcttataaacaaattaacaggtagaaaaagcactcaaactggagataagccaggagtaacgaaagggaaacaatgggttagattaaagggaaatcttgaacttttagatacacctggaatactttggcctaagtttgaagaccaagaagttgcattaaatttagcatttagtagagctataaaggatgagattttagatactgagactttggctttaagacttatagaaaaacttatgaaaatagaacctgagaagttgaaagccagatataagttagattgtctaggagaaactccaattgaaactatggatatgattggccataaaagagggtttataacaggtaaaaaagaactagattatacacgcatagccgcaactgtattaaatgaatttagagatggaaaaataggaaatataacattggaagttccagaaaacgttaaaagatagattttaaaacaaaatcaaagatttaatgttaaaaaaataaaaaagccttttagcaaaggcttttttatttttttgaaatatagacaaatatctccatataaaagtataaattaggttagaaaacctttaaaaatattaatttaagacaaatacacctaatattttgaaaattaaaatgagtgtgattattttaaattttagcatattgacttgcttgtttcgtataatatataataagcacaaataaatacaatatattaaaaatttaatttatttaattttattaatttaataataagttcttattgtttaatttaatttatttatgcaagcgtaaacaatcgagacattttattaatttaataaggttaaaaagggggattttataatgggtaagaccaaggatgttatagtatttggatttgcgttatttgcaatgttctttggagcaggtaacttaatatttccaccttacttgggaataattacaggtccagaatggttaattgccttcttaggatttacgtttgctgatgctggattggcacttctagcagtaatggctacagctaaattcgatggaaacgtagttgaaatgtttaaaagatgtggtatgaagttagggattcttataggttgtgcagacattttatgtataggtccattcttagctataccaagaacaggtgcaacaacttatgaaatgggtataatgcctttatttggaacttcaattccagtgttattattctgtatacttttttttgcgctttcatatgtactaacaataagaccttctaaggtcgtagatatagttggacagtttttaactccagctcttttaatagctctagcatttataattataaaaggtattatatcacctcttggagatatagtagataaacctatgatacctaatgtatttgcagaaggtataggtcaaggatatcagacaatggatgcttttgcagcaatagcacttgcatcagtgttaatagtatctttaaatgataaaggatattctactattagtgacaagttaaaaatgattggtaaggcgggggttcttgcttgtggaggattagctctagtttatggaggattatgtttccttggagcaactgtatcaacaatgtatggaacagatgcagtacaatcacaagtaatagtaaatataactgaaggattacttggaaatgttgggaaagcgattttagcagtagtagtatcattagcatgtttaactacatctataggtcttacatctgccacaggtcaatatttctctagacttacaaaaggtaaattgagttatgaaaaaatagtattagctgtatctgtattcagtgcagtagtagcatcttttggtgttggaactataataaagatagcatctcctatactaagtatagtttatccaccatcaattgttttaataattttagctttcttcaatgaaaaaattaagaatgataatgtgtacaaaggagcagtatatatgtcattgcttgtaagtatactaacagttatatctagttatggagtagatgttccagtagtaaaatctttacctcttcattcattaggatttaactgggtggtaccagttataatagctggaataattggtaattttataccatcaaagagtcaatctaatacacttggaacaaactaagttttgtttaattaaaatataatcaattgtaaataaatgagttaactaaaagtaaaaggagttatttgtacaaataactccttttattttgggattctataattaattatttgtatttaatatggaaaaagtataagaaaatatcaaaaaaatatatagtttattttttaacaataatagagattaaaaaagaattttagagtaattttataaatttaagtatacatattaaatgatttttacaaaaatataatataaataaaattgtgacaataataaaataataaaacaaaatttaagacatatgattatataaatgtattaaataaatgagtaaattgttttcattgagagatatattaagaatttttagttaattatgacatataagtatgtaaacgtgaatactagcaactgcaaagtttaagtaagttggaagttagaaagtaattgctatgaagaaaaataagttgataaatcataataaggaattttcagaaaaaatggttttaagactaaaagacaagaggtaaatctacgtgagtagaataaaaattgaataaagttaactgtcaatttagcaaaataaatacaaaatactacaagaattaacgttaataggtgttatgataaaaggaaaacgattttttaagaatcataattttgaaaattaaaaaaattaaaaatgctattgactgcttttttttcagattatataataaacacaaaatatttaaaatttaaattgaattaaaaagattatatgaatgtaaaaaggagagtgatatatacagtatataaagcaatacaacttaataataaaacgaataatctaaaaagtcttaatattttaattgttctgaatagttaattttatcaaggaaaattagagaaaaaacaaaaaaccaactatgtttaaagtatacaggttgattttgtttaattaagaaagttgtattaaatattgtgaagattttataaattatgaaacataattgacaaatttaagtcaaaaatgtataattaaataaaatctcgtcaaaaggttttcatttaatgaagagattggacttattttttagtaaaaggtagtaaaattcaaatgggggtgctttaaatgggtgagaaacaaatcaattttaaagatgtaattgtaattggatttgcactatttgcaatgttttttggtgcagggaacttaatcttccctccatatctaggagttttatctggaagtagttggctaatagctttcataggattcctttttgcagatggtggtttggcattattagcagttatagcagcaactaagttcaatggagacacatcgaagatgttctcaagagcaggcaaaggattaagtattgcattaggatgtgcaatggtaatctgtatagggccacttttagcaatacctagaacagcagcaacaacttatgaaatgggtatattgcctacaataggttctggaataagtccagtaatattctctatagtattctttgctctagtattggttttaacaataagaccatcaaaagttgtagatatagttgggtcaatattaactccagctttacttatagctttagcagtattaatagttaaaggtatcgtatctccattaggagaaataagagacagttctttaattcaaaatgtatttgcagaaggtataactcaaggttatcaaacaatggatgcattggcagctagtgtatttgcatcaattataatcatgtcagtaatagctaaaggttatacaggtgagaaagaaaagatgaaagccacaataagtgcaggtgtaattgcagtaataggaatggcattagtttatggtggattatgttatcttggagcaactgtgtctcaacaatatggacaagatgttcaacaaacagctttaatagttgcaataacagcagctttacttggaactacaggtaaaattttattggctattatagttgcattagcatgtttaacaacagctataggtctttcttcagcagctggtcaatatttctcaacacttacagatggaaaattaaagtatgagcatatagttatagtagtttgtgtatttagtgcaatcatatcaaactttggagtaagtacaataataaaattctcttctcctatactaagtatggtatatccagcaactataactctagttatactagcattatttagtaataaaattaaaaatgacaacgtgttcaaatgtgctgcatacatggcattattagtaagtgtattaacagttgcaacaagttttggtgtaaaaattcctctagttaatagcttaccatttgcttcattaggatttaactggatagttccagttgtaatagcaggaataataggaaactttattccatctaaaagcagtaaaactgcataataataaaactaattgataattgtggaattgcctttaaattatatggcaattcctttttatatttaaaagaattattaaattattgtggagaaaagaacattattaatctcatttgataaatttatttttggaggagtatgatttataaagacaataaaataaaaaagatttatttataattataaataaaattaaattatatattatgaatgtttaatattaatataaaaacatcaatatatatttttgtaaagaaaaaataaagaatttattttctgaatacttattaattaatcaaagttaaaatgaaaaaaatataaaaaaataaagtatataagagtataatttgacttttatatacttttttatattatttttgagttttttaggaagatattttacaagttaagaaaactataaggagtgttatattgaatataaaatagtataatatatattatgttagataattaatatgaaaatatacaaatatataaaaaagtttgtttagagttatagttaatgtgtgtattaatttaatactaatttattggaggtttaaaaatgaaatacataataaaaagagatggtacaaaagaactttttagtaaaagtaagattgaagatgctgtctataaagctagtataaatagtgaaggtggagtagatagagagttggcatatgatatatcaagaaaaatagctaatgactataattctatggaaaaatgcttatccgtagaagaaatacaagatatagttgaagtactacttatggaatcaaatagaaaagatatagcaaaacactacatattatatagagaaagacgctctgaaataaggactaaagcttgggagtttgatgaattacaaaaatcaatatggaagaacaagtatagacataatggtgagagttttgatgaatggataaagagaatttcaaataatagttcaagaatatcaaaactaataagacaaaaaagatttctatttgctggaagaattttagcaaatagaggattacagaaagaaggaaaaaaagtaacatattctaattgttatgtaatagaaccaccaaaagatagcatagaagatatatttgatactgcaaaaaaacttgctagaacttttagttatggtggaggagttggaattgatatttcaaagctaagaccaaaaggagcgaaagttaacaatgctgcaaaacatacgactggagcagtctcttttatggaactttacagtatgacaactggcttaattggtcaaagagggagaagaggagctcttatgatttctatggatgtaaatcatccggagatagaagagtttatagatataaaaacagatttggagaaggttactaaagcaaatatttccataagggtaacagatgaatttatgcaagctgtaagggaaaaaaagttatataattgtacttttgaagttgaaactactggagaaaaaatagttaagatagtaaatgcttatgatttatttaataaatttgtgaaaaataactgggattatgcagaaccaggtatattgttttgggataaaataaaaacatataattttatgagtgaagataagaacttttgcttttcaggagtaaatccttgtgcagaagaaccacttccaagtggaggaagttgtctacttggctcaataaacttgtcagagtttataatacaaccatttggtgaacatgctacttttgatattaataaattaaaatcttgcgttagagaagctgtagtagctttaaatgatgtcttagatgaggggttgaacttgcatccattacaagaacaaagagatagtgtacataagtatagacagataggtttaggtgtaatgggtatagctgatatgcttataaaaatgggaataagatatggttctgatgaatctttagaactatgtgatttaattggtaagactatgttaaatgaagctgtgaagcaatcagcattaattgctaaagaatatggaacatttagtgagtataaatatgaaaatatttctaaatctaagttttttatagaaaatctaaatgaagacactaaagaaatggttaaaaagtatgggcttagaaattcacaacttttaaccatacctcctacaggttctatatctacaatgataggtatcagtggtggaatagaacctatatttaatctttcatatataagaaaaactgaaagcttgcatgatgaggatgtgtattataaagtatatactccaattgttaaagagtatatggacaagaaaggtattacagatgaagaatgtttaccagatttttttgttactgctatgaatataggatatgaagaaagaataaacatgcaaaaagtatggcaaaagtatattgatgcttctatatcatctacaataaatataccttttgaaactacagttgaagatgttttcaatatatatattaaggcatgggaggctggtcttaaaggagtaacaatatttagagatggatgtaaaaggagtggaattttaataaatgaaaaaaaggaagaaaataataaagaagataaaaaagaaaatagtaaaaaagaatattataaaaataataaaaaagaaaaagataataaagatgaaaaagccaaagaaataataaataaaaattttgaagaagatgaaaaatttgtgtgccctgaatgtggaagtgaaggaattgcacatacaggtggatgtagtatatgtttaaaatgtggctatagtggatgcaattaaactctaattaaaaaattttaatatatttaaaaattaaatttttaaaaacgaaagatgagggaatggtatgcaggataaaagtgtgagggagattaaagaaataatagagactttagaagtagaaaaatatatggaatatatagaactgttaagagttgatgaaagaaaatctgtacaaggtctagctataaaactagcaaaaaagctggataatattagaaaagaagaagaaagattggaaactataaatatatttgagaacgaaggctatgataaaggttatttgtatattggaggaattgatgaggcgggaagagggccacttgctggacctgttgtagcttctgttgtagtatttaaaaaagatacaaaaatagaaggtgtaaatgactctaagaaactgagtgaggcaaaaagagatgaactttttgaagtaataaaagaagaagcactagattatggaataggtatagtaaataatgaagaaatagatgaatttaatatattaaatgctacatatatggcaatgaaaaaggctataaattgtttaaaaaaagcaccggattatttattagttgatgcagcaacaataccaggtattgacatatctcaaaatccaattgtgaaaggagattcaaaatctatatcaatagcagcagcaagtatacttgctaaagttactagggatagtataatgtaccaatatgatagagtatacccagaatatgggtttaaatctcacaaaggatatggaactaaagaacactatgaagctattgaaaaatatggcataactcctatccacagaaaaagttttttgaaaaatatactgtaaatataatatgatataatgtatataatataaattactatagttaatgggggattaaagatggaatataatgaattattaaaaagtgctagagaaaatttaaatggaagttgtaaagtttgtaaggtttgtaatggggttgcttgtgcaggtgaagtgcctggcatgggaggtaaaggaagtggttcttcttttatagaaaatagcaagagtttagaaaaagtaaaagtaaatatgagagtaatacatgatgtatcaaatcctgatacatctatagagatgtttggaaagaaaatgagtgcacctatatttgcagctccagtaacaggaactactttaaatatgggtggaaaaattaatgaaagagattacatagaaccagtagttgcaggatgtgctaatagtggtatttatgcaatggttggtgatacggcagtagatgcttttttaatggaaaatttagatgtagtcaaaaagtataatggagctggaattgtatttattaaaccttgggataatgaaaatattataaaaaagataagattagctgaagaagctggtgcatttgcagttggagttgatatagatgcctgtggtctagtaactttatcattacatggaaaaccagtacttcctaaaaatgttaaacaaataaaggagttagtaaagtctactaaactaccatttatattgaaaggtataatgactgttgaagatgctttaatggcagtagaagcaggtgtgtatgcaatagttgtatcaaatcatggaggaagagtgcttgactgtacaccaggagcatgtgaagttttaccaaaaattgctgatgctgttaaaggtaaagttacaatacttgcagatggtggagtgagaactggtttagacgtactaaaaatgataggtttaggtgcagatgcagtattaataggaagaccttttgtgactgcttcatttggtggtgcaactgatggtgtagaaacttatgtaaataaacttcaatcagagctaagtagttctatgatattaactggatgtcaaactataaaagatattgatggaaaagttatatacaaataaaattttatacaaaaaagaggaaaaatcattttaatgtagaataattgtacaaagggggaatttatatgagtagaaaagcttatgaagaagccttagtagaattagaaaaatttattgatgaaagaaaagaaataattaaaagtgcggaggactgtattgataagtacatagttgacagaacgctaccttttgattacaaagataaatgtgtggaatggcaacaagagttacttgatattgcagaggcacaagttttagaagcaaacgaattaggtgttttactggaagagaaaaaagaacttgaggaagagtaagttttattactaaatctagggaaaatcaagaatatgatttacccctagatttttttatttaaataaagatgtctatataattaatctatctttatcaatgttagattaaaaggtttgaagaaaaatagagtaattgtatgaatagttaaacaattaaactagtctataagaccaatttaattgttattttttgaatttagtatatggtttttcatttcttctaatacaattgtgtaggatttgcattgtgctgcagccaattctgacaaagcaaacctttgagccttatttagaaagtccttatctgtgctacatagttgttttgaattatcttgtatcataagcatcttaattaattttacaatctcaaaaacatctcctgaatgaaatttatcatggtatagtttaagtcgtttttttctatcaaaaacccataaacaatcaaccttatcaagggattggataaagttttcaacttcattttcatccataattggacgtacaccaatcttatcagcatttaaaactggaatcgaaattttaagattactattgtaaataacagtcaattcatagtatttctgtatatgatgatttatatcctttgttacaagaccacttatataacaggctccttcttttggatacattacactttcaccgattttatacatatggttatacctccaaactgaattttagatattgcaatttgggtacaatgctttaattatctaataattaatattatatcacgaaatgcttgacaagtcaaaaagattaatatataataaaaagtttagaataatagatatatataattggctataaaaatataagataagaggatttaatatattaaaatatctagttagtattgtataaaataacatactaactagatttaataattattaatttctagcaaaatctcttaagttaagacttccggctgttacaaataccattccaataagaattaaaacaattatatttattaatatattaccattattattaatagcatctatagtccaataaaatggtgtaagctttgaaagattagccataaaggataatttatcaagtgatggtatcatattagatatggatatagctaaacctattaaagaataaaacgtagacataagacttatagaaccttcgtttttaaacaccctagctatccaaaatacaaatccagtagcaacaaaactatttgctagtacaatcatcaatgtatttagagtcaatttaaaattacttatagatgtgaaacatactaaagttaaggtgtatacaattgcttgagtaaaaaataaccctaaaaatatgctgaaaattatttttatatcattatgctttgtagaaacaagtctttttaaggtattagatttctttaatgaaaataaatcagaagctagatgtgctgcattaatgtacatgaaataacatatcaagaaaactattaaaaatgaatttttattcttacctgaactgttatcaattatatttgtcttggtcaatttatcatctatatttctatctatttttaattttaatgaattagtaataaaagattctatttgtgattctgcccaaagactacctccaccattttcagttttaaaacatttaacctcaggtcgttttaagttatctatattgcttgaaaagtttttatctaaaatgaagacagcagaaactttattattttttaatagatccatagccttgtcttgttcgtttaatccaaatgagttttcttttaatttagaactatctattaacttatgttcgtattttccagaagaattggatacaatcgctactggagaaaagtacattgattgattttctgagttgccagtaaaaaagttaagataaaacattaatataacaggaaacaaaaccatattaactaaaagagcatgattttttatatatctttttatgtttgcaatagtcaacctaatcattattaaacctccctccatttatatttttcttttacaatagaaagtgcaatcaatactgtagatgcaattaggcatgtaaaaattaaactttctattgaatctatagttttaaacgtctcataattactgaacaatgttcctattaaataagtaggagataaacttgtaaacttagtaaacacatcatttactatgctgaaaatacctccaaaaactgtttgcaagaagagtaatgcataaactataactgtaccatatttcttgctaaaaaaggtagttataaaagtagatattgaagtcataaaataagaagctaaagcacaaagtaaagctaatataacaaagttacctttgaatgttacaccgagtgttctaaaaaataaaacgtataatgataaaaatataaatgagtaaatccagaaacctataaaatcataaattaaaaattgtactctagttacaggtatagagtagagtctttttgaaagtccttttgattcacttacataatttgataaaatgctattcattataaaaattattgcgaagaatccaagggaaactaaagcaaagtactcataagagttttgtttaacattattttttattatagaggtatcaatagaattcttattaaataattttgagaaatcttctgaacttaatttttgagaattattcagatataatttttcatgataagtatctaatatatcttgaagtaatattgcaatattatcattagatttaagtttttctatacttagattatttgatttttcatttaataaattattctcatatcctttaggtatagtaagttttaagtctgccttagaatcatctttttgaactgttaatatagaagataaatcgttttttagatatcctgtcaaattacttgatagctttgtattatctttatcatatataacaattgatgtcaaatctgtttttataggattttgaaatatactttctgtcaccatcccaagaaatccagctaaaactagaggtaaggctaagaaatatattaaattaagcataaaggagctttttaaaacttttagcatagtttttacactaatgtacaatttcatgaaatcacctccattagtcccttaaatttttacctgttagatttaaaaatacgtcttctaaactaggttcttcataagatattcgtgttatttttgaattatttttgtcaacaacagataatacatctgtaagttgtaattttttgtctacacctaattctaataatgaattattttctaaaatagatacaacacctttagtattttttaaatcaaatataagttgagcatttatattttttatttccataattaattttgtatttgtagatactaatgattttaaataatcattatctccaaaagcaatctctttaccttcatccataataaaaatcttagaacaaagatgctcaacttcttccatataatgagaagtatatattactgtggttttttgctttttagatatattttttataaaattgaaaatatggtttcttgattgcgggtcaacacctacagttggttcatccaatattaatattttaggatgatttaaaagtgctattccaatgttcaatctcctttgcataccaccagataattttttgatttttttctttttaacatcagtgagtcctgtgacttctaaggcttcagttattctctcttgaagcaattttccctttagtccatagtaagtgccaaagtactctaagttatcaaaaggagtaagagtctctataagtgctaattcttgtggaactaatcctattatagactttgcttttatacaatcttttgacaaatctaaaccattgatttggatgtcgccactatttggtaacataagatttgtaattatatttataagtgtagatttaccagcaccattcggtccaataagtccaaatatctctccttctttaacagaaaagctgatattatcaagtgctaatttatcattaaatctttttgttatattatttactcttactatatccataataattcctcccaaaataattttgtataagttaaaaatctataatactataataaagaattatgaatcataattctattactataagtcactaaaaaaagtgacttaagtcactttatattttcatttattataaatgagtttgtgagtaagaaatttctagggtatagatttcttacctatatatttatattacaattttatttttgaaggcaaatataactagttgtgtcctatcacgaagctctagtttccctaagatattggtgatattattctttattgtaccttcagataagaataattcttggctgatttctttgttgttaagtccatttgcgattaatctaattatggatatttctttttctgttaaattatacatatcagaaatatgtttttgttctatagttttttgagggtacataattttttcagccacacttttatcaagtacaatatttccaaaaaacgaggaacgaatcccttcatgtaatacttcatccgaactatcctttaaaagatatcctgaagccccaaatttcatagcatcttctatgtactcatcatcattaaaggttgtcaaaattaataatgctatagagctatcatattcttttataagtcttgtgcctagaactccatcacaaactttcatccgaatatccataagaactatgtctacatcatttgttttacaaaattctaatgcttcatatccattggaagcatctcctacaatttctaaatcgtcataagatgataaaataatgttaagaccttttctaatcaatttttcatcatctactataagaactttgattttattcaaaaaaatcacctcctgaaaatttaggaaaagacgctctaattgtgaatccagtattagaattatcgaattcaactttaccatttaattcatatattctttcgctaatactgctaagtccatttcctctttttatattgttacaccctataccattatcgctgatagtaattataagatttgaaggattaaatgttataaaaattctgatttcagttgcttttccatgtcttgatgcgttggaaagagattcctgaacaagtctatataaagcgatagattgatttgtagataggttccaggtattttttgatatagttaatctaacgttgatatttgtaagtttaataaagctattaaccagttctctgattttaagtaaattttggtaattttcatattcaatgggttttagttcagatatagctcttctcacatcttgaaaactttcagttacaaactctctaagttcatgaactaaatcagaaatgagaggtttgtcttttaagagtttttctatagcatttaattggattatcgtcgtagaaagagaatgtcccacactatcgtgtatttccctcgatatacggtttctttctttcaaaattgctaactcttctatagaatttgcataaatctctaaatcggcattagctttttttaattcatctttagaaaccctgagtttgtcataaagactttgattgtataatttagataaattctcgttttctagatacacagaaaagagggttataattagtaatgtagaacttgattctagtgctaaatataaatttttatctaaaccaataataaaagaaaatattataactaaagagaataatatatatttatatttttcctttattaaaaatgaggcatccaaaattaaagaaacatagtaaagtggattaaaagtctttatatacttacaaaatataaaaattagaataagctctaaaaaataagaaataagtataaatttattctcacttgataaagaaaaaaatctaacttgattatttattattagaaataatataatcattgttatagctggatacaatgtattttcagtatggtttaaataacttataagtaatataaatagagataaatatcgtataaaaataaatgttttttttctgttcattaaagacattcctccataaaaataaactttcattataaaaactagcataatatcataaaagaataaagtcaatagaagtatttattaatatcaatggaaataaaatcaatttcaaaaaattgaatagttaaattgtatactgacgataatttaaaagtaaaaatttaatatattggagtagataatgaataataaagaaaaaggtgattttggagaagaaatagcagttaattatctgctatcaaaaggtgcaaagatactagaaaaaaattatagattaaggataggggaggtagatataatagcaaatataggagatgaagttgtatttgtggaggtgaaatcaaggtctaacataaagtatggctacccttgtgaatctgtagattttaaaaaaagaaaaaagataattggtgtcgcaaaatactatattataaaaaataacttaaataatactcccataagatttgacatcatagaggtctatttgttagaaaaaagaataaatcacataatgaatgctttttaaaaaagataatgtttttggaaaggattaaatatgttaagtattattaattcaagcaacttagtaggaatcgacagctttttagttaaggttgaagtagatgtaagcaatggaatacctagttttaatattgttggtcttccaggcaaagaaattaaagaagcaagagaaagagtaaagtcagcaattcttaatagtggatataaatttccaagcacgagaatagttgtaaatttatcaccagcagatataaaaaaagaaggagcttttttagatttatctataagtataggccttttaagagagttaataaaaaaagatgaaaattacataagagaaagtatgtttataggagaattatcattagatggaaaaataagaaaagtaagagggatattgcccataattatgggtgcaaaaactcagaacataaaacgtatttttataccaattgagaacataaaagaaagtctattagtagatgaaattgatataattcctattaaaagtttaaaagaatgtgtcgattttttaaacgaagagataaaagtcgataaagtaagtataatgtcttttttggatgataagtcaagaaaagagaacggagaattagaaaaagataatagttatatagattgcaaatatactaagattaataatgaagaaagtaaatatgatgaagactttaaagatgtaaaaggaaattattttgtaaagaggagtgcagaaattgcagcagctggaaatcataatatgtttatgattggacctccaggctcaggaaaaactatgattgcaaaaagagtaaggacaattttaccagatataagtatagaagaaatgatagaagtaagtaaggtttatagtatattgggtatgataaatgaaagtaaaggaataattgataaaagaccttttagagcacctcatcatacaactacaaagcaatctttaattggaggaggaatggatgcaagacctggagaaattgctttagcacatagaggtatcttatttttagatgagatagccgaatttgatagaaaaatacttgagactttaagacaacctatagaagatggatatgtaaatatatccagagtaaagtacagtgcaaaatatccttgtagagtactgttagttgcagctatgaatccatgtccatgtggttattatatgtcagagacagagtgtagatgtagaagtaacgaaattgatagatacataaataaaatatcaggtccattgttagataggtttgatatttttgtagaagttaattctataaaatattcagattttaattctttaaaacaagaagaaagctctcaaaaaataaagagaagagtagaaaatgctagaaaaatacagataaatagatttaagaaagataatataaaaaataatagtgaaattaaagcttacaatttatttaaatattgtaaactggaaaaagaagcttcaaaaacggctgagatgatatttaataaatacaacctaagcagtagaagttatacaaaacttttaaaaatggcaagaacaatagcagatttagaagaaagagacttgataaattcacagtgtattatagaagctttttcatttagaaaggcttattatagttattttaaatagttttttgaggtggattttatggaaaaaagagatacttatttatggttaaaatcaattggtggaataacaacaaaaacaattgaaataatagaaaatgaaatagtaaatattgaagatatatttgatttttctgaaaaagaaatatataatttaaaaaatataagcttgaatattagaaaaaatatagtaaaatatagaggttacgcttatttagaaaatataaaagaactactttacaaaaaagcgattaaatatatttgtaaatatgataaagaatatcctgaaaatttaaagaatatatacaacgctccaaagttattattctacaaaggtgacataggtttagttaataataattttaatatagctatagtaggttcaagaaaacctacagcctatggaattaattgtgcaaaaacaataagttgtcaactatcccaatatggagttaatatagtaagtggattagctataggaatagatgcatactcgcacataggttgtatgagtggaaaatctaaaactatagcagtacttggttcaggagtagacaatcctcttccaaaacaaaatttacatttatcaaataaaatattagaaaatgggggattattattatcagagtataatattaactcgacagtagccccgtaccatttttctaatagaaatagaattatcagtggtttaagtgatggagtagttgttgtagaagcagcaataaaaagtggtgcactaatcacagtagattttgctcttgaacatggaaaaaatgtttttgcaatacctggtaatataaattctcaaatgagtagaggttgtcataaaattataaaagaaggtgcaaaattaattgaaaatatagatgatattttaaatgaatataacatatttaatattattgataaaaaaataaatcaaaaatatgataatataagtctaaatgccaagtctaagcaaataattgaagctataaaaagagaaggaaacttgcatatagatagtatttgtgattatactggtatagaaataaagtatgtaaattcaataatcaatgaattagtactaaatgagttagtagtagaaatgaataataaaacgtacagtttaaatgtataaattaagattaggtagtgggggtgtatggttttatggccaaaacattagtcatcgtagaatcgcctgcaaaagctaaaactatagaaaaatttttagggaaaagtcattacacagttaaagcatcagttggtcatgtcagagatttacctaaaagtaaattaggtgtagatatagaaaataattttgaacctcaatatataaatataagaggaaaaggcgatgtaataaaagaattaaaaaaagaagctaaaaaatctaaacaagtatatctagcaactgaccctgatagagaaggtgaagctatatcatggcatttagctcatatactaaatttagatgaatctgaggattgtagaatagagtttaatgagataactaaggatgcaattaaaaaagcaattaaacatcctagaaatattgatataaatttggttgatgcacaacaggcaagaagagtgctagacagacttttaggttatcaaataagtcctatattatggcaaaaggttagaaaaggtcttagtgcaggtagagtgcaatctgttacaacaaagttaatttgtgatagagaaaaagaaataaaggcatttattccaaaagaatactggacaatagatgttgaggctaagacagtaaaagacaaagatataactttgaaattttatggtaaaaatgatgaaaagattgaattagaaaatgaagaagctgtaaatgaaatactaaaagaaatggaaggtaaagatttaaaggttgagaagatagaatctaaatcaagacgtaaatcagctccaaaaccatttacaacaagtatgcttcaacaagaaggagcaaataagttattttttactactaaaaaaacaatgatgatagcacaagaattatatgaaggtatcgacatagaaggtgaaggtactgttggtcttatatcatatataagaactgactctaaaagaatatctgatgaagcaaaagaaaaagctaagggttatatcgtaaacaatttaggagaaaactactataaaaacactggtgataaaaaagaaaaaaaggatactaaaaaggttcaagatgcccatgaggcaataagaccaacctcagttgatagaactccagagagtataaaagcctcattgagcaaagaccagtacaagttatacaatttaatttggagaagatttgtagctagtcaaatggaagattcagtgtttgatatactaaatgtagaatgtaaaataggcgatattgtatttaaggcaactggttcaaaaatgaaatttgatggttataccaaggtatataatttttcagaaagagaagacaaaattttaccaagtatagaaaaaggagatatattaaatatagaaaatatattgccagaccaacattttacacaaccaccagcaagatatacagaagctagtttagtaaaaacactagaagaactaggtataggtagaccaagtacgtatgctccaacaatagctactatactgaatagagagtatgttgaaaagcaaggaacaagtctatgtccaacagaacttggaataatagttactgatattttggaaaataatttccataaatttatagatgtagattttactgctgatatggaaagtaaacttgatgttatagaagaaggcaatacagattggaaaaagattgtatcagaatcatatgcaccacttaaagaggctattgaagaagctcttgaaaatatagaaaaagtaaatatggatgaagaaactgatgagatttgcgagaactgtgggtctaatatggttatcaaatatggtagatttggaaagtttatggcttgtaaaaactatcccgattgtaaaacaactagaccaattatgaataaaattggtgttaaatgtccaaaatgtgaagaaggagatattatacttagaaaatctaaaagaggtaaagctttttatgggtgttctaattatccaaactgtgactttgtagcttggaataagccaacaggagagttttgtgagaagtgtggttcatatatggttgaaaaagtgactaaatctgaaacaaaaacagtgtgttctaataaagaatgtaataaagagacaaaagagcataatgacggaaaagagtgaaaattgaaaaaaatcacataattctcttgaaaaaggttccaatctatgataatctttcaagtgtaaacaactaatagaaaaataaattttcattaaatgtgaaaataatattagaaaatataaaaggttattaaaaggcctaaatttcatgaggagatgattaaatggcaagtgaagtgttacaaaaaacaaggaaaataaataaaacattacaaacaagtggtggaagcagtgtctcttttgatttactggccggagcattgggcgacgttttaagttctaatgtttatgtagtaagtgcaaaaggtaaagtactaggtcttcatttaaatgatgttcaagacagttcagttatagaagatgagtatactaagcaaaagaaattttcagatgaatatactcaaaatgtgttaaaaattgatgaaacattagaaaatttaaatggtgagaagatattagaaatctttcctgaagaacatggaagattacaaaaatatactacagtagttccaatattaggaagcggtcaaagattaggaacattggtactttcaagatattcaaattcattcaatgatgatgatttagtaatagctgaaaacagtgcaactgttgttggtcttgaaatattaagagcaataggtgaagaattagaagaagaaatgagaaagaaagctgtagttcaaatggcaataggcactctgtcctactccgagcttgaagcagttgaacatatttttgctgaattggatggaaaagaaggtctacttgtagcaagtaagatagctgatagagttggtataactaggtctgtaatagtaaatgcacttagaaaatttgagagtgcaggtgtgatagaatcaagatcattaggtatgaaaggtactcatataagaatacttaatgacaaacttacagatgaattaaaaaaattaaaaaacaatcaataatctatattttataggtttagattagaaaaggtatctatttcaaatagataccttttttagacgaattattaaggtaatgataagtatattaaaaaggagtgagaaaatgcctttagcagataaaataagaccaaaaacaatgaatgatgtaataggtcaaagtcatataataggtaatggaaaaatattgtctaagatattacaatctaattttttaccaaatatgatattttttggtcctcctggtgttggtaaaactacagtagcggaaataatagcagaaagaagcaataaaagcttctataaaataaatgctactaattcatctttagaagatataaaaaaggtgatatcagagcttggaagtataaataatgtaaatggagtcctattatatatagatgaaatacaaagttttaataaaaaacagcaacaatcaatattagaatttatggaaaatgggagtataactttgattgctagcactacagaaaatccatatcattatgtatataaagctcttttaagtaggtctactgtatttgaatttaaacctttagaaaaacttgatatagaaaaaggactgaaaagagctgttgaagtattaaatgaagatagctatatggatattgagtgcaataataatgctattgaagatatagcaattctttctgatggagatatgagaagagccttaaatattttggaagtggtagtctattcaactaaaccaaataaggataatataacttatatagattcagatgtaataagggcatctacatttaataaaattataaactatgacaaaaatggtgatagtcattatgatattttaagtgcatttcaaaaatctataagaggaagtgacccacaggcatctatacactatctagcaagacttataaaaggtggggatttgataagtatatgtaggagacttttagtaatagctagtgaagatataggtttagcttatccaaatgctattgtaattgtaaaggcatgtgtagactcagctatgcaacttggatttccagaagcgaaaataccattagcagaagctactattcttttggctacatctccaaagtctaattctgcatgtatagcaataatgaaagctatggatgaactggataaagagtttgttaaggatataccaaatagtataaaggatgctcactattctggttctaaagaaataggtaggggttgtggatacaaatatcctcataattttaaaaatcattatgtaaagcaacagtatttaccagatagcataaaagatagtatttattacataccacaagaaaataaaactgagaaaaatataaaaaaatatttagaatatctaaatagtgatttttagactgaattttatgtatcgggggtagatattatgattataaaacttaactcaacttatcacagtagagttatgaaatacttaaaaaaagaacctgagtacaatttgtttataataggggatattgaaagatatggatatggaaataattttttaaatatatgggcagacgtgggtgaacatggtgaaataaaggcaatattacttaaatattttgaatttatgatgttttattctgatggagagtatgatgttgaaggtttttataatctacttcgtaatactaattacgaagaaatatctgggaaaatatgtgctgtagatactttagcaaagagattaggacttaataatttaaaggtagttgatttttgcaaacttcaaactaaaaagtttttgatagataataattgtaatgcaaaggttaagagaattaggcttggaaatctaaaaaagacagtgaaactttatgacttaatagatgaatttcacagtacaactttagagaatttaaaaaatggactaaggacaggtagaggatattgtatagagattaacaaacaggtggtgtcaatggcaaagagtacttcagaaaataggactcatgcaatgataattggagtaggaacacatcctaaatatagagctaaaggacttgctacaaaatgcctaattaaactatgttcagagttactgagagaaaacaaaattccttgtttgttttatgataatgaagaggctggaaagatatataaaaaactaggatttgaaaacattggaaaatggggaatttattcaaaataaaaaattaaaattaatcttgacaaaattagtagggtataataaaattatcttgaaagtaattcctactaaaacagtatgaattagatttctatatagaggtgataatatatgaagttgtctactaaaggtagatatggactaaaagcaatgtttgaattagcattaaatcaagacaatggaccagtatcattaaaatttattgctaagaagcaaaaaatatcagatcagtacttagaacaaatattttcatctttaaaaaaatcgggtctagtaaaaagtgtgagaggtgctcaaggaggttatttgctttcaaagaatgctgaagacataacagtaggagatatacttgtagtattagaaggaccagttgcattatctgactgtgtactagatgaagatgtatgtgaaaactcaaacatgtgtgtaacaaaaatagtttgggaaaagatgaaaaagggtatagaagatgttatagattcaattactcttaaagatatgataaatgactataacaaaaataaattagaaaatgatataacaaatattaaaaaatagatttggagatgaatgtaatggaaaaaagaagattgtatatggattattctgcaacaacacctattaaaaaagaagtattggatgcaatgatgccatacctaacagattattttggtaatgcatctagttttcacacattcggaagagaagcaaaagatgctttggataaagcaagagaacaagtagcagcccttataaatgctgaacctagtgaaatatattttacagcaggtggttcagaaagtgataactggacactagagggtgtagcttatgctaataaaaacaaaggtaatcatataataacttcaaaaatagagcaccatgcaatacttcatacatgtgaatacttagcaaaacatcatggatttgaaataacttatttagatgttgatagcgaaggaagagtagacttaagacaactagaagattcaataaaagatactactatacttataagcataatgtttgcaaataatgaaataggaactatacagcctattaaagaaatatccgaaatagctaaaaaacataagatattattccacactgatgcagtacaagctacaggtaatattccagtagatgttaaagaattaggaatagatttgatgagtatgtcttcacataaaatatatggaccaaagggtgtaggagctttatacataagaaaaggtgtaagacttcataactttgtccatggtggagcacaagaaaaaagcaaaagagctggtacagaaaatatacctgcaatagttggatatggaaaagcagcagaattagctaaggaaaatatgcaaaatcatgtagaaactttaactcgtcttagaaataagttaatagatggtgtgttagaaagaataccttacacaagagtaaatggtagcttagaaaatagattgccaggaaatgcaaactttgcattccaatttatagaaggtgaaggaatacttttattattagatatgttaggaattgctggttcaagtggttctgcatgtacttctggttcattagacccttcacatgtacttcttgcaataggtttaccacatgaaatagcacatggttcattaagacttacagttggagattttacaacagatgatgatatagattatatactagagaacttaccaaaagtaatagaaagacttagaagcatgtcaccactttatgatgatgcgaagaaacaaggtttagtaaaatagacagaaagataaagcataaaaaatagacataaattgagtaggaggaaaagataatgcaatatagtgataaagttatggaacattttatgaatccaagaaatatgggagaaattgataatgcaagtggtgtaggtgaagttggaaaccctacatgtggagatataatgaagatatttttagacatagatggagatgtaataaaggatgttaagtttaaaacatttggctgtggttcagctatagcaagttcttctatggcaactgaaatgataaaaggaaaaactataaaagatgcattagaacttacaaataaagctgttgcagaagctttggatggtttaccaccagtaaagatgcattgttcagttttagctgaacaagctgtaaaagcagctcttatagattatgctcaaaagaacaatatccatataccagaattggatggatatgttatagatgatgctcatgaccatgatgttgaagaagaagaataaaaataagtgattgtgttatgagaagtttacaatgattaaaaagaagtactaatgatataattaggacataaaaaatagctgtttttaaaatggctattttttattgcctaaattaagtattttaacttgatttagaggttaattagttaacaaaataatccataagattcaaataataaagatgattatttttttagaaaatagaacaagctatattttaaataagtacaatacttgctctatatggtataataataagtaatgcaaaagatgaggtgaaatttgtttatgaataaaaaagtaatgataggtatgagtggaggagttgatagctctgtagctgcatatcttttaaaacaacaaggatatgatgtcattggtgttactatgaagttgtggcaagatgatgatgttgttgaaattgaaggtggttgttgctctttatctgctgttgaagatgctagaagggtagcaaataaaataggtataccattttatgttttaaattttagagaagtgtttaaagaaaaagtaatagattattttatagatgaatatttggaaggaaaaactcctaatccctgtatagcttgtaataaacatataaaatttgatgatttttataagaaggctagacaaataggttgtgattatgtagctacaggtcactatgcaaagatagaaaaggatgaaagtacaggaagatatttgctaaaaaaatctgttacagataaaaaagaccaaacttatgcactttataatcttacacaagagcaactagagcatactttattgccaataggtgactatgaaaaagatagagtaagagaaattgctaaggaaatggggatggcagtacacaataagcctgatagtcaagaaatttgttttgttaaagataatgactatgcaaattatgtaaaaaaacattctaaaaagcgtattgaagaaggtttttttgtagatactaaaggcaatatacttggaaaacataagggtatattatattatactataggccaaagaaaagggcttggaattacttttggaaaaccaatgtttgtaatagacataaatccaataaataataccatagttcttggagacaatgaagatttatttaaaaaggaacttattgctaaagatgttaactttatatcaatagatacgttagaagaacccttaagagttcaagccaaaataagatattcagcaaaaccatcaccagctactattcatagagtaggagaagatactattaaaatagtttttgatgaagctcaaagagctattactaaaggtcaatctgtagtaatgtatgatggagatattgtagtaggtggaggtataatcgagaaaagtttataaaaacatctaaaaaattaaaaaaataagcaataaagtatattaagagtaaataaagtttataaaataaatttattgtatattaaaatatagtattgattaattttgtaaaatttagtaatataattagtatattaattaaaaaacaaatacagtgataaggaatagtaaaatatttgatgtcttacagagagagggaaatgctggaagcccttagaatatgatatttgaagcagccttttagtagcaatcttgaacaatttatcttttataaagaagatttaagtagagattgacggtagttacgttatagctaaggttttccgaagatatcatactttgtatgataattagggtggtaccgcgattgtcctcgcccctataaatttatttatagggacgaggttttttatttaaacgaaaaaataaaatttattaggaggaacatgatatggaaaagatgggattaaatgaaataagaagtaagtttttagaattttttgagtcaaaaggtcattatgtagcaaatagttattctttagtaccaaacaatgataagagtttgttacttataaactcaggtatggcacctttgaaaaactacttttcaggtgtagaagtacctccaagtgtgagaatgtgtacatctcaaaaatgtataagaacaggagatatagaaaatgtaggtataactgcaagacatgctacattctttgaaatgatgggtaacttctcatttggagattactttaaaagagagtcaatcaaatggggatgggaatttgttacagaatggctaaatataccagaagataagatatgggtgactgtatatgaagaagatgatgattcttatgatatatgggcaaaagaaatgaatttcccagaagaaagaatggttagacttggaaaagatgataatttctgggaaataggtacaggtccttgtggtccttgttcagaaatatattttgatagaggagaagaatatggatgtgacaatccagactgtaaaccaggctgtgattgtgataggtatttagaattttggaaccatgtatttactcaatttgatagagatgaagaaggaaattatagtctattagaaaacaagaatatagatacaggtatgggtcttgaaagaatgggatgtattatgcaaggcgtagacactatctttgaagttgatacaattaaatctatactagaagcagttgagaagttaacaggagtaaaatatggagagaatccaaaaaatgatatatcaataagaataataactgaccacataagagctgtaacattcttagttagtgatggagtgcttccatcaaatgaaggaagaggatatgttcttagaagactccttagacgtgctgctcgtcatggtaagttattaggagtaaaagaattatttttacagaaactaatagatgaagttataaaggtaaatgataaagcatatccagttttagttgaaaaagaaagttatattaaaaaagtagttggaatagaagaagaaaaattcaatgaaactatagaccaaggaacagaaatattgaactcttatatagaagtattaaaaaatgaaggaaagactgtcctaagtggtcaagaagcttttaaactatatgatacttatggcttccctatagacttaactaaagaaatattagaagaagaacatctatctgtagatgaagaagcttttaatgaagaaatggaaaagcaaaaagaaagagctagaaatgctagaggaaatatggatggagaaagttggaaggaagaccctctatcaaaattagaatctacagttgacagtacatttaatgggtatagtgaaatttatggtgaaggaactattgaagctatagttaaagatgatgagctagttcaaagtgcagaagaaggcgataaggtatctatagtactagataacactactttctatcctgaaggtggaggacaagttggagattgtggattgataactaatgaaaacttagttttagaagtattaaatactaaaaaaggtgctaataatagtataaaacatataggtataataaaatcaggaagaataagtaatggggacaaagtaaagacactcgtagatagagaaactagaatgtcagctgcaagaaatcacagtgctacacatttacttcataaggcattaagagaagtattaggagaacatgttaatcaagctggttctttagtaactccagaaagacttagatttgatattactcactttgaagcgatatcaaatgaagaattaaaagtaatagaagaaaaagtaaataatgttattttatcatctttagacataaaatgtgatattatgaatataaaggaagctaaagaaaaaggagctacagcactatttggtgaaaaatatggtgatgaggtaagagtagtttctatgggagattattctacagaactttgtggaggaactcacttgacaaatacttctcaagtaggaatgttcaaaatattatctgaaggtggagtagcagcaggtgtaagaagaatagaagcaataacaggaaaagctgtttatgaatacctaaaagaaagagatggaattatctctgaagtttgtgtaaacttaaaatctaaagaagataatttaattcaaagaataagttctttattagaagaaaataaaaacttatctaaagaattgcatgatatgaaagctaagatgagtttacaatcagttgattctatttttgattctaaagttgaagtaaatggagttaatttgataactaataaatttgaaggtatggatatggatacactaagagaaacagcagataatctaagagataagcttggttctggtgtagtagtacttgcaaatgtagtagatgataaagttaactttgtagttactgccactaaagatgtattagataagggaatacattcaggtaatattgttagagaagttgcaaaaatagctggaggaaaaggtggaggaagacctaatatggcacaagcaggagctagtgatgtatctaaggttgaccaagctttaagctatgcaagtgaggttattaagacacaagttaaataacattcactcaaggaggtttttagtttggaaaaagatttagactacactatgaaatttgaaggaataccagaagataggatgagtgtaggagatactattgattttgtatataaagcattagttgaaaaaggatataaccctataaatcaaattatagggtatctcctttctggtgattctagctatataactagtcataaaaatgcaagagctataattaaaaaatttgaaagagatgagatacttgaagaagtaatcacgcactatctgaatagaaagtaggtcaaataaatgagaaaaaagattatgtcgttgtttgcaatagtcattatgatttttgtatcaactgctagctatggttttgctgaagaaaaaggcaaggtcatatttattgatatgaataggaccaatcttggaagtatgatgaatattccaatcttgaaaaatgagatagaaaagagaggctatgtagctctcatgaatataagaggggatcaaggtactgatgatagaaggtcttatgcaagtatgggtgcaggaacaagagctagtgtaactactgaagactatatcaattttcaaaaagtagaccaagatactgctaaagcttttgaagtcgcaacaggtcaaaaagctaaagaaataaatgatttaggcattaatagatctataaatgaaaatcttgagtatggagaatatggagcaaatttagggtcattaggaaaaactttatcagaaaatggtttaaagacatctgtaattggaaatgctgatataattgaaaataatcaattagttaaaaatagaaacttatgtttagtagctatggaccaatatggaaggattgattcaggtaatattgataatattaataagaaagattctaaaatgccatttggaatatctacagactacgataaattactagatgaaactaaaaaatcctataaaaatagtgatgctatatttgtagaacttggagatacatatagattagatatgtatagattaaatctaaatgataatacttatggtacaatgaagaaaaatattgtaaaaaatataaataaatatcttgaacaagtattttctatggttggagaaaatgacactgtttatatagcaagtgcatttccaagtgacctagattataagaataagagaagactttctccaataataaaatttagtggagaagggaaaggtctactggaatctgccacaacaagaaaggctggaattgttgccaatttagatgttggagtagatatactaggtacatttggtcttgaaaataaagagatggtaggtagaagttatactttagtaaataaagaggacaatgttggctatctaaaatcactttatgaaaggatagtgtctatatcttcaataaggtcaactattataaatggctttgtaggcgtaatatctgcttcttgggtaattgccatgtttgcgattttctttagaaattatatgccacataaagagcgtgtattcaaagtacttaaggagtttataaaattaggcataataatgccactatcatttatgttagctcctttgatgaattttaaaactccaatttcaatatctttgggaatatttgcgactacgctaatattatacttgttaggtagaaaattatttaaggacaatgatataaagcacatgggattttttgcaacacttactattttagtcatagttatagattctgtatttggaacatacttaatgcaaaataacataatgagttatgatgctgtcataggagctaggtactatggtgtaggaaatgaatatgaaggtgtaactatagcaagtgcagtatttggcttagcagtattattacattataagaaggtatctaaattacttgttgtaattttttcgttaataatacttataactagtgcatatccttcaatgggtgcaaatgttggtggagctatatcagaatgtgtagcatatttgttgtttataatgcttatatatgacattaaaatagattttaagaaagctgtattattagctgtttcagctgtagttgtcgtttttgcatttgcagctttagatatactttcaggtagtgaatctcatttaggtatgtttgtacagagaattttcctaaatggaccaggagagatattacaaacatttggaagaaaaattcaaatgaatatgcaactagcacagacaagtgtatgggtaaatattttacttgtaggaattggagtaattgcagtacttatatttaaaccatctagacactttagaaagataatgaataattttccaatcttgtttaaagggtttattgcatctatggttggttgtataattactcttttagttaatgattctggaatagttgctgcatctacagcatctatatatatacttataccactaataataataaatataaatatgataatatttgaaaaaaacaactaaaaaattttttactgttcatataggatttaaataaaaaatgcaatatgattattaatgtaaactggatgcttacataaaaaatcatattgcaatttttatgattgattatgcaaaattctatgaagcaggaagcctgtgaccttagttatgagaggttcagaatatgtatttaatctatagaatataaatagataaaggaggaactatgttagatggaagaataatgggtcttgatgttggtgataaaactattggagttgctgtgagtgatttgatgggattaactgcacaaggtgtaaaaacaataaaaagagttggcaagaaaaaagatattgaagagttaaaagcaataataaaagaaaaacaagtaaataaaattgtatcaggattaccaaaaaatatgaatggaactttaggtccacaaggagaaaaagtaatcaagttttgtgaattggtaaaagcagaaacaggtattgatgtagagttttgggatgagaggctttctacagtagcggcagagaggtctttattagaagcagatgttagtagacaaaaaagaaaaaaggttatagatatgttggcagcagtaataattttgcaaggatatttagattttaaaataaattcataaaagaactataaaattgaatacttatgatatataatataaataataaaaataaaaataaatttgaggtgaatgacattatggaagaaaatataataaatttaatagacgaaaatggcgttgaaagccaatttgaaataatattaacattagaagcagaaggaaaagagtatgcaatattaatgcctttagatgatgaagaagctgaagaagctttaatctttagaattgatgaggatgaagaaggtgaaatattaatacctttggaaagtgatgaagagtatgaaactgttgtagctgtgtatactgctataatggaagaagaaggtttaaattacgacgaagatgaatcaaatggacttaactagataagtaattaagtttgtatataaaaatcagatatttattatatttgctttaattaaaccttattaattgtaaaagcatttatagtatatatctgtttttttgttttttattaaaaataccaaaaaatttatgaattttggtgaataatatatcttttatgggtatatatttatattatgagaataaattaaatttatttaaatgtcttgacaaaaaatgaattatcaattacaatattatttaataaagattatcaattgaaaatagtaagggtgatgttatggcaaatacaatggatttattaaaagacaagttaaaagaaactggttttaagattacgccacaaagaagagcaatagttgaaatattgcttaaacatgaccattcacatctaagtagtgaggaaatctatgatttagttagggttgactgtcctgaaataggcttagctactgtatatagaacaatgcagctattggatgaaataggattaatatcaaaactaaacttagacgatggatgtataagatatgagattagtctacataaagaagactgtcataatcatcatcatcttatttgtaaaaattgtggaaagataatggaagctaaagaagaccttttagacaatatagaaaaagagatacaatcattgtacaaatttaaaatacttgatcatgatgttaaattttatggattatgtgacgagtgtaatggagtaagcgattcagaagaataaacttctattgcttaatgtcgatggaagaatagtatagaacttttatattctatgctattcttccattttttattataaaccatctacaaaatgcaaatatacagttttcaagatgcttatagttttaatattgaaaatataattaatcctataagtacaaaaatgaatgatttttctatgaaattactaaatggtcctccaacagttaaaaaacctaaagaaattttcttttcgcttagcggataaaaaattggtattccttgctttgtaaataaatctcctaaaaacatatgacttgcataaccaatcgtaccataaaaagataaattattaatattagtgattaattctatctgttttagtaaaaaatatactattatagttgcaaatatgctatgagaaaaacttctgtgctttaaccagggaaaaattgacaacattagacaaaaaattgtaaaatatatttcaacttctatgatgtataagcatatagctaatagtataaatattaatgatagaaaaacttttcttagaaatgtgtgggttagttttgcttcaataattataattgcaacaaatgtaattattgcgcttaaataaaaattatcatttatatttattgaaataaagaaaataataatattaacagcatatataaaaattctatatatgtatttggatacattgttttttagaatgaaatttgagaccatagaattagatttatccaaatcgggtagtacagcaaaagtagctgaaactaaaatatcaactaaagatataggaattttaaatattaaagatgtttggatagctgttaagattcctattgcacaatgagttttaccacgcataaatcctcctaaattatccgatattaaatcatataatatttagaggatatcaaaataaaataggtttgtcaaaataatacgttaaatgtattttaaatatagcttaaaatatgatacgaattatggtacaataagaataactggtagcgagtgcgtgatttgatattatttatgattgtagaacgtgttaaaaaattaaatagacagaaggagatgatgcaattgttcaaaaagaacaccaacaagataaaggtaatggccttgggtggacttaacgaagttggaaaaaatatgactgttgttgagtataaagatgaaataattgttatagatgctggacttagttttccagaggatgaaatgttaggagtagatatagttataccagatataacttatttagtaaaaaatagggataaaataaagggtatatttattacacatggacatgaagaccatataggagctcttccatatatattaaagaaaataaatgtacctgtatatggggcaagacttagtataggtcttatacaagtaaaacttaaagaacataaaatgaataatgttaagttaaatgttataggtcctagacaagttataaagcttgataatatggaagtagagtttttgaaaaataaccatagtataccagatgcttactctattgcaatacacacagaccaaggtataatataccacacaggagattttaagattgacttgactcctattgatggagatgttatggatatgcatagaatctgtgagttgagcaaaaaaggagttcttttaatgctggcagatagtactaatgcagaaaaaccaggatttactatgtctgaaaagactgttggggtaggtcttgacgaattatttgcaaaaggaaatggcagaagaattatagttgctacctttgcatccaacatacacagattacaacaaataataaatactgctgaaaagtttaatagaaaagttgctatatcaggtcgctcaatggtcaatgtagtcggagttgcaaaagaattaggatacctagatatttctgatgacatgcttatagatttaaatgatatatgtaagtatgaagatagtgaattagtgataataacaactggttcacaaggtgaacctatgtcagctcttgctagaatggctttttcagagcacaaaaaagtagaaataaagagtggcgatttagttataatatctgctcatccaataccaggaaatgaaaaattaatatcaagagtaatcaatttcttatttgaaaaaggagcagaagtagtatacagtgatatagctgatatacacgtttctggacatgcctgtcaagaagaattaaaacttatacatgcattagttagaccaaagttttttatgccagctcatggtgaatatagaatgttaaaaagacatgctgaaatagctgaacagcttggtatggataaagaaaatatttttgtcatgcaaacaggagatgttttagaattagataaaaactctgctaaggtagcaaaccgtatacaaacaggaaacatattagttgatggtctaggagtaggcgatgtaggtaatatagttttaagggatagaaagcatttatcagaagatggtcttatgatagttgtagttactatttccaaggatgagggtaaggtcttagcaggtccagatataatttccagaggattcgtatatgtaagagagtcagaagatttaatggatggagcaaaggatataattaagaatgttctaaatgaatgtgaagagaaaaatattaaagaatgggcttatttaaagaataatattaaagaaaacctaaaagaatatttatatcaaaaaactaaacgaaatccaatgatacttcctatcataatggaagtataatataaaaaaactataaatttgaaaattagacctcttgtaatttttaaagtaatatcaaaaatccaattgatattatcttaagaattacaagaggtctttttaatactcatttaaaaaaaatatatattacataaaataccaattataacaatcttttattagtaaaaactacttatatataaattttactgataggaggattcttatggatgatgtttcaagacaaaatgctataaaagctttaaaacaaacaaaaatggaaatagcaggagagtatggaatgaattatgaagatgcttttgaaataatagaaaatgcgtctaataaaggtgttttagaaggttactttaaaaagcttgaaaagaaaaaaaatttaggtcaaggtatatctaggcatttagaataaaaaaagttaaatgtgagaaaataagtttaaataaactttaagaggtgacatcgatgaaaaaattagctagtactgctttggctatattaattgcgcttactcctttaagcttttcttttgcaaataataaggaaaatgctgatgccaaccaactaaatatatcttcaaaatcagcaattttgatggatgttggtagtggacaaattttatatgaaaaggatgctcataaaaagcttcctcctgctagtgtaactaaggtaatgactatgctacttatagtagaagctttggattcaggcaagattaagcttgatgatgaagttcaagtaagtgaaactgcatctagtatgggtggtagtcaaatattcctagagccaggagaaactcaaaaggttgatacattattaaaaggtatagctgttgcttctgcaaatgatgcttgtgttgctatggctgaacacttagctggaagtgttgaaggatttgttgatagaatgaatgctaaagcaaaagagttaaatatgaatgatactcattttgcaaatacaaatggacttccagttgcaaaccactatacatctgctcatgatatagctttaatgtctagagaactattaaaacacgaaatgataagtaaatacttaactacatggatggataaggttgtagtagggaagaaacaagttacagtaggtcttgcaaatactaataaacttataaagcattatcaaggagcaactggtgttaaaactggttttactcaagaagcaaaatactgtttatcagcatctgcaaagagaggtaatactcatctagttgctgcaactttaggagcagagacttctccagaaagatttaatgatgcctctagccttttaaactatggatttgctaattatgaaagtgttaagttatgtagtaaaggtgataatatagcaacacttacattggataaggctgatgaaaacaaagttaaattggttgctaaagaagatttaaatgctcttattaaaaaaggaagctctaaagaatttgagaagaaaattgaaatagtaaaaaatcctaagatgccaattaaaaagggaactgttttaggaaaaataaagatatgtaaagataaaaaagtaataggcgaagtggaattgataaatactaaggatataaataaggcaagctatctacaaatgcttcaaagaataattgataatatgatataaataattatcagatgaaatataattataatacacaaagatatgattataatacacataaaaaatacccttatgtagttatttgccataggggtatttttatttaccatatagaagtattttataatcttatgatttttatagaaatatagaaaagtttatgtatcttaaaatatcatttgatttaatatcatatatagggttgtttaacaattatctaagtaaaggcatactaccagtaagtttattcactttctttttattcccataaattgctatcccaaaatactgtaactcatcttctggaacactagcaatcttttgtgtaaattcttcataaagattgcaactttgtgctacatctgaaaaatctacaacagttaaatcgttaaattccaaagtatataattttttacgtaaatcttttattatttctttgtttccttttaaaataggtacaggaatgtcaataattcctaagtggctattacctgttttgtcaattacatctggcccaacagtttctggggcatgttttcctagtgtaattcccattatagctgctgtattggatataattcccattggtaaattttcgtctattaccatgacacattttgaatttttattttccatttttatttctcctttttaccttatttaaagttgtttgaatcatcatttataaatatattttgatactgctttggtgtaagaccaataaaattcttaaaaaagtttgtaaagtgactttggtctacaaatcctgtttgtatcgcagcatctataggttctacgcctttttctaaaagctttttagctttgtttacccgtatattttctaggtatctatatggtgtaataccttttaatttcgtaaaattacgaagtagagagtacttattcatacctgctatagtgcttaattcgtcaagtactatatgttcagcataattattttctagataatcacatactgcttgaatttctatatttgtattttccaagttagattgcaaatttggctctgtatgttcttcaattaattgctcaattaggaagaaaaaaagctcttcctttttaaaatccaattcttcttccatgattatatagtgtaattcttgtagtagaggtactagctcactgcgaaatataacaggttgattaaattttggtaaataatttttacctgtaatttcaaagacggtttttttcattatttctggcttaatattgatacatctgtaatcaagtactttatcatctatttgttcacaagtatgactgtcaaaagggttaaaaagtagcaaatctccagtacttgtggtatactctttatttttacaagataaatatctttgacctttttctataaaaccaattacataatgttcatgaaaatggtttgggaatttttgcattatgcctttaaatctatatgcttcaatttttaattccctatcaaagcatactgtgcgttcttcttgtctcacttaggtaacctcctttcatgttatacaaagtgtaacacatatttttttatacttcttgtataatattgactaagagacaataatgtcaattcatgtcaatataatattacacttacagtaggtgtaattattatattttcacaatgaatatgatataataataaaagttataaaataaaaagcaaattttaattttatgcctagaagttaaaattattataatgtaaaataattttgattataagctatttaattgttataataatattaaaaatttaatttaggagatgtacattaatgttaagtatgaatataggagaaatagtagcaagtttagttggtatagctatggcaatatcaatacatgagtttggccatgcttattcagctcacttattgggagatgatacagctaaagcttatggtagaatgacattaaatcctgtaagacatgttgatccaataggtcttttggctatgtttatccttaagatagggtgggcaaagccagtaccagtaaatccaaataattttaaaaactataagataggaaacctgatagtttcacttgcaggcgttttttgtaatgttttgactgctatactgtgtgtaattatcaataagtatgtgcatatgtatgctataaatacaatagctggatatgtgcttatatatagtatgggatttgcagcttttaacttacttccgatacctccacttgatggatggggagttatatctacatttgtaccatataaatggaatgaatatttgtataaatttgaaagtatgagttatataattttattaattgctttatttactggtatatatcaaataatactatcaccaatatatacagtgttgctaaaaatagtatatttatttgtttaatataataaacagattaaagagggattgatatgaagtataatatacaattacaagtctatgagggaccattagatttactttatgatttaataacaaagcataaaatagatataaaggatatatctataatagatataactaagcagtatctaaattatttgaaaatgctagataaaatggatttagagataactagtgaatttataactatggcatcaaaacttttagagataaagtctaaatatctgctttataagcaaaaagatgaagaagaagacccaagaatagaacttatggaaaagttagaagaatatagaaagtttaaggtagcatcacaagatataaaagaaaatataacttatgttaatgagagattttatagaaataaagaagagataattattgatgacaatgtggatttagaagatatatcaattgaagcaataaaaaatatacttccatacatatttaaagttaaaacatcacagatagaaaatgctaatgatgagaaactagacaaaatagtaaggaagaagataatatctgtggaagaaaagatattgtatataagagatattataaaagataagattgaagttacttttacaaatattataaaatcatatgaaaatgatgaaataatagctacttttttatctatattagagcttataaaagaaaaagaaatagtagtagtacaagacatattttttgatgatattctaataagaaaaagttcggagtgttaaaatgaaaagagaagatataaagtatattatagaatctgttatgtttgcatatggggaaccaataagtataaaagaattaaactatataataaataaagaactttcatcaaaagaaatagagattatgttaaatttacttattgaggagtacagagaacaaaatagaggtattcaaataatcaagctagagaataagtaccaaatgtgtacaaataaagactatgcagaatatataaagaagattattgaaccaaagaaaaagaaaagtttgagccaagctacattagaaactcttactataattgcctacaaacaaccaataacaaaggtagaaatagaggatataagaggagtaaaatgtgataaggtattacaaactttgtttgaaaatgaacttataagagaagctggtagattgaataagatagggaaaccaataatttataaaacaacagatgaatttttaaagttgttgaatatagaaagtcttgaagaattgccgcctatagaaaattatcaagaagtggcaacaaatgaataaaaatataaaatcacaataatttagtatgtaattttaaattttaaaagatttaaaatgctctaagttgttgtgtttttttgtataaatataaaattataattctcttaaaataaatatggataattaagtataaatagtaattttttgatgataatataaacatggagcttaatgaattatttaattttaagtatttaataatagctgtaatttttattataagtgtaactatgttgattttaatatctcatataaacatcttaataatagctgatataaacaacaaagatatttgtttaaagcttaatataaaatacatgtttaatttaataaatataaatagacaactttatccagctgaaaatagtaaaaataatgataaaaaagaggggatgaagaataatatagattcaagtatattattagctgatgaccttttgagcatttatagattattaaaaaagataaaaatacatgaactttattcaaatattaattttggaactggaaatattggcttaacatcttctgtatatgtattgataaatactttgtatggaaatttatttaatatgattgatgcagaaaaaatgtatttaaatgtaaatccagattttacaaaagattatgttttaggaaatataaggatacatataaggccaagaataaaagctttatttaatattataataatgattaataaaattatgaataaaaataaaggaaataaggaaggtgatagtaatgagagcaacaggttcgatacaaagtcttatggaaacaactcttgaaacaattaaaggttctatagatgcaaatactattataggagaccctataaaaacagatactacagtggttgtacctatatcaaaggttacaattggctttggtataggaggaggagaatactcaaaaggatatgatgataaagatagggaaattgaattaaaaaatgaaaaatcagatacgaattttgctggaggtagcgcaggggctatatctgtacaaccagtagcatttgtagtagttgaaagtggagagactagaataatgagtttagacagtaatatcaatctagtggataatatattatctataactcctagagtattggagaaaattcaaaatatatcacaaagtaataagaatcaagataaaaacaatatgtaagaataaaatatttttaaatatgtatatagttttaagtaaagtagtggggttagtataaatcccactattttgttgtgtactttaaacatttatatctaataagattttagtttaaaacaatttaaatagataataaagttgatatatagtataattataaaaagaaaagaagtattatattatagatatataaacgcatttgagatataagagggagttataaatcattagttttgaggtgaatgttatgagcgataaagaattatctattttgttgttagaaagtatgaataattttcataatttaataaagattattaataacgaaagatataaaaaagataaggttcttacagaaagacagttctttgccttagtaaaaataagaaaacatgataaaatagagcttaaaaatctaagtagagatttacatgtatctacttctagtctgtgtatactacttaataaattggttgagcaagagtatgtatatagggaagaagatagtagagatagacgaaatactttttatggaataactaaaaatggagaaaagatattggataatgaaatactaaagtttgtatctataataagtgataaaatggattgcttagatatagataataaagataaattatttacttctttggaagagtctaaaaatataatagaacaattattttaaaaaggagaatttattatgaatataaagtattctaaagagatattaaaaagtttagaaaatgctataacagtagtagctctatttgagggagaagatgtttctacgacatttgataaaataaatatgataagcagaaattttaattctaaagaaaatagtatagatactgtaacattggttgaaaataacaacttggtaaatgtttgtcttgttggttttggtaagagagagttattgaatagagaaaaaattagaatcataggtggtaatttgtgtaaaaaattaaaaaatatattgaaaaatgaagcatataagagtagtgatgttaatgtacttaatcttaatttaaatagtgatgaaataggttcttttgtagaagggatattacttggaaattataagtttgataagtataagacaaaaagtaaggattttgaaagaaaagaagttgatactataactatatttactgaaaaagaagttgagtgtcaaatagaaaaggctaaaatattagctaattcaactataatagctagaaatctagttaatgaaccatcaaacgtaatatatccaaaaacattagcaatagaaacagttaaacttggtgcagagttcgggtttaatgttgatgtttatgaagaagaaaaaataaaggcattgggaatggatgcttttttcgccgtttcaagaggttcaatcaataaaccaagattcatagtaatgagatactttggagataaagaaagtacagatatattaggtctagtaggtaaaggattgacttatgatactggtggatattctttaaaatcaaatgcttctatgctagatatgaagacagatatggctggtgctgcgagtgttataggtgctatgtgtgctatatctcaaagtaaattaaagaaaaatgttatagcagtagtggctgcatgtgagaatgctttatcaggaggttcatacaaacctggagatataattagttctatggcaaagaaaactattgaagttttaaatacggatgccgaaggtagacttacattagctgatgcaatatactacattataaacaatgaaaaagtaacaaaggtagttgatgtagctacattaactggtgctgctttaacattgttaggaaatgttgcaactcctatagtaacaaataatgatgatttttattgtgaattagaaaaagctgccactttatcaggagaaagggtatggaagatgccaatttatgatgaatttaaagatatgataaaaggagaagaagcagaccttaaaaacactggtggtaaaaatgctggatgtataacagcaggagcttttattggtgaatttgttgggaatactccttggatacatatggatatagcggggacaagtacatcatcaaaatcaattggatacaaagcaaagggggctacaggagaacctgttagaacattatactatttggcagaaatctaaaaaacaattataaaatataatttataaagccacatggatatttttgtaatttaagattatctatgtggctttattttttatttaagtaaattatttactctttttctttttctcaagtataaaagtatctctattaaataaaagagcaggtatgtacataatactagtaacaaaaataaacgtaaaaatagcagttgtgctatgacttaaaaaaccataatagtattgtgagttggtaaatgtgtttagtaaaaatatgaatgaaaaataaataaaacatatagctaagttatctctaagtgcatatctgttaactctaaattttctaacatcaaccatatatatatctgcataaattatcaagcacttagagaagataaatataaaatatattaagctaggaaattcatagcccaagtttttagaaaaaatgagttctccaactgaacaaactaaactccaagaaaaaaatatattaaaaagatgatactgcttaaaaattagtatggctatacacagatatatacagatataattgattccaattggtaaagagtttagagtactataattacctgaagaaataagtaataattgctctagagccataattattacaagtaatgtacaaattatcttctcaactgtatagctataaggtaaaatatttttggttagttttggacaatagtataaaaataatccaaatataaagagacttacaaattgttcactagaaaaaagaaaaattttaaacatataacattctctcctataataaatttaatatgtatctatataaatatattcattatatctcaatttaatatataaaaaagataataatagttagactttttatatgaattttaataggtaaaatatcctattgttttgtagatatatcctaattatgtcaaaaaataaaaaaatttttatttattagagtttttggaaataataataacagatattataattaattaacagtttttgtaagtatttgacaatagagagggtgtaacaaatgggaataatagagtcagcatcaaaattggctgagatggttcatttattggctgttgaaaaggggataactgatatagaagcatgggatgaagctgtgaaagaatacagcaaaatttatgaagaaagaagaaatgaatagaatgataaaaaatgaaaacttgatgataaaaaataactttatttaaagaaattcaatttttatagaaatattaaaaataatataaataaaaagatggtatttcaaatgtaagtaaaaaatcattttgggataccatccttattatttattttaataatatataagtaataaatcttacttatccatattttttatgtaacctcttttttctagcttttttatatgctccttacgtatttcatcaagattaataccatattgttcttctagcttaaacatcatagtaacacatgtctgagctacatccattagttccttagcagttttctttataatatcaacttcatctaaatcattattttctccacttagatttctgaatttacctatacattcagctaattcaccttgttcttcacccattttgataaatgtagattctagtgttgggtctaaattattaagctctggtaaagatatagtttttagtttcataaaagctcctttcaagttattcgtatttatactaaaacatcataacaaaaataatactaaaaaaaaactttaaattcaacataaaaacttacatatataataaaaatcgtgaaataaatctatatttgtcttaatacagcctcatataaaacttctccaataggtttatttattacaagagaagctgacttatcatagactgtatttgctttattaataagagcaatataatcacctttgtaataatctataaaacttgctgctgggtacacagctaatgatgtacctcctataatcaataaatcagcattacttatagcagaaattgttttagtaatgacatcactgtcaagagcttcctcataaagtactacatctggttttactatagaaccacagttgtcacaataaggaatattacctcccagatttaacatagattctaagtcaaaaaacttaccacatttagtacaataatttctatgtacagaaccatgaagttctagcacatttttacttccagccatttgatgaagtccatcaatattttgagttatgacagctttaagcttacccatttcctcgagttttgctaaagctatatgagcattgttgggttttgcattaggatatattaatttatccttataaaattcaaaaaattcttctggatatctaacaaaaaaagtatgtgaaactaattgttcagcagtaaattgtttattgagtttttggctaaataatccagtagaacttctaaagtctggaatattagattcagttgaaacacctgctccaccaaaaaatacaatattattgtgattagctattaagtcttttaagctatttgcatccatagttacacctccaaattattatatataaattgtactacatattaggtcttttatgttttattaatttaaataaatatgtagtttaataagttaaataaagggaatataaataaaatgtatacagagtataaatagacaatatttactaaaataacaagttgtcgtataattatattaaaattgttttagtgtataagaagggcgggggaagtacgtgaagaaaaaagcagctttagcaacattggctatgttacccttaggtgtggtaaatgcacatgctgatggagatataggtatagtgactataaattatttaaatgtaagaaatgagccaactgccgaaagtagcatagcctttgttgctaaaaaagatgataaagttttgattaaagactcttctaatggatggtataaaataaaagctgaatctggacaagaaggttgggcttcatcaaaatatatagcaaaatcaaatagtgactctttaagaacgtctacaaataaagaaaaacaagttatttcaaatagtttaaatatgagaaatggagcaggtacaagttacagagtaataactgtactaaaaaaaggtcaaaaagtagaagtaatatcagagagtaatggatggtctaaaatcaaatatgatggaagactaggatatgtatctagctcttatttaggagacgtttcaaattcaactaataaatcaaaaactaaacaagtgaatacaacttcactaaatgtaaggagtggaccaaatacaagttatggtttgttaggcaagttgccaaaaggaagtaaagtagaagtaatatcagaaagtaatggatggtccaaaataaagtataatggaaaagatgcctatatatctagtatgtacttatcggatgtaagtcaaagtaattcagacaattctagtcaaagcaatgataaaaagaatactgataaggttgtaaatacagcttctttaaatgtaagaagtggaccaggttctacatatagtaagttgggaaaagtttataaaggaagtaaagtaactgtactatcagaaagtagtggatgggctaagattaattttaacaataaagaagcatttgtagtaggcaattatttatctacttcagcagatacttcaaataataactcaaatagtaactctgataacagttctaatagtaatggcaataattcttcatcatcaggtcaagtaaatggtatgtcaggtataagtggggctaaaattgattataaatctttgagttatactttagaatctcatataagtaaacaagttgagaaagcagcatcaggaggaaatgtgatagctccaagtaataggaaaagcactccaagtcctgaatttagtactttttcagctcaaagaacaagctcatttgtaaatgcaagttcaagtgatatagaatattatttaaatcctaaaaattttacaaatactactaaaggtatgatgcagtttttaaagattaacagttatagagatggtatttcagaatcaagtcttaactcgtatcttaatggtttatcttctagtgtatttaaaaaccagggagcagcctttataaatgctgccaagaagtataatatagatgttgtatatctagtatctcatgctatgtgggaaactgcttatggtaagtctacacttgcccaaggtcaaacattaacatcttataagggacaacctcttagtaagccagttaaagtatacaatttttttggtataggagcaatagataaaagtgctaatgtttcaggtgcagaagcagcgtattccaatggctggactagtgtagaagctacaatagatggctctgcaaagtggatatcacaaaattacgtaaatagttctaagtacaatcagaatactatctacaagatgaagtggaattatgattatacatggcatcagtatgcaactgatgtaaactgggctaatggaatttctggaattatggaaaatttaattggtctttatggaggaggaagtagtttggtttttgaagttcctcaatataagtaatacataaataaaaaatatagactatgggtagttttcattttatttaaattatctatagtctttttgtatataatttataatctgtaaatttaatgttaacaaaacttttatgttataatattaattctaagtaaatataagtgagtaataggtagaaatagataaaaagtggtaataatatatataaagataattttgagaaaggaggatatatatggaaagtattaaggaatatttggataagttagaaattaataatagtggtcttggaaagcaacttaaagaagtttatataaatagagtagtttattttaaggaagataagatagtttatttttatctaacttctaaagatattgtttctcatgaacttttagataaatttaaagaagaattgatgtataaactcgattattttaaagatatgaggatgaagataagatttactggtcttgaaagaaaatccaataaagatgttataaaaaaatattggaataatatattgtatatattaaagtatctttgtccatctattgcagggtggtataaacaagtagaatttctttgtttagaagaagaattaaaaataaaacttccaaaaggtatattttatgagcgattaatgaaaaaaaatgtaacttatgtacttaaaaccgtgcttagcgaagagttgggattagatttaaatataacaatagaaaaagctgttgatgaaaaggtaaataaagaaagactcataagaatcaatgatagagaaatggaagaaaaaattagggctttagaaattggaaaagttaataactgtgaagaaaatgaagaggaaagctatgtcattaagtctgatgtagatgaaaatttaatctatggagataatgcaaatgctatgattgaaaatatagttgaattaaatgcatcttctggaacagttgcagttgttggagatatatttgatgttgacactaaagaacttaaaaacggaaaaatacttatgatagcttcaattacagattatactagctcaataagctgtaaactttttttaacagatacaaataaggatggagtacttgaaaatgttaaaaagggagcatacttaaaaatcaagggtgacatagtttatgatacatatcaaagagaaattagtatgatgattagtgggataagaaaagaaactagaatagagagagaagataaatcagaggaaaaaagggtagaactccatgcacatacacaaatgtcttctatggatgctatttgttctgttaaaaagcttgtagagcgtgcagccaaatggggtcattctgctattgctataacagaccatggtgttgtacaaggatttccagatgctatgaatgcaggtaagtcaaataatataaaaatactttatggagtagaagggtacttggttgaagatgattctctcattatagaggatgcaaatgataaagaactttcgcagacatttgttgtatttgacatagagacaactggtttttctaatacaaatgataaaataactgagattggtgctgtaaaaatagaaaactttaagattgtagatagatttagtgagttaataaatcctgaaaaagatatttcctataagatacaggaattgacaggaataactaatgaattaattaaagacaagccaaccattgaagaaattcttcctaagtttatggaatttgttggagatagtgtattagtagcacataatgcagagtttgataccggatttatatcgcaaaaatgtagggaacaaggcttgttatataataacaaaaaagtagatacacttatgttagcaagagtaatgttgccaaacttaaaaagacatagattaaatgtcgttgcaaaagaacttggtattcctcttttaaatcaccatagagcagtggatgatgctgaggctacagcacttatatttaataagtttttgcagatgcttacagaaaaaggtgcaaaaactctaagtgatgtaaacaatatacttggaaagattgattacacaaagcttagcacaaatcatataaccttgatagcaaaaaattctataggtataaaaaatttatataaaataatttcagatgcacatgtaaatcatttttttagagcaccaagaatccttagaagtgtattaaatgaatataaagaaggattaataattggttcggcttgtgaagctggggtggtttttcaagctgtaaagaaaaacgtgtctgatgaggaaatgaaaaaaataatagatttatacgattatattgaagtaatgcctatagataataatagatttatgattgataaaggagaagtaaaggatgaagaagagttaagggagttgaataggaaattaattgatacagccaaaaaatttgacaaaattccagtagctactggggatgttcattttttagacaaacatgaagctgtcttaagaaaagttcttaaatattctcaaggttttaaagtagatgaagaagaaacttatttacattttagaacaacagatgaaatgttggaagagtttagttatcttggagaagaattggcatatgaagttgtagttgaaaatagtaatctgattgccgatatggttgaagatataaaacctataccagatgatacttatcctccaattatagagggctcagatgtggagttaagagaaatgtgttacaaaaaagccaaacgaatctatggagacccaataccagaaatagttcaaaaaagactggatagagaattaaattcaataataagcaatgggtatgcagttatgtatattatagctcaaaaactggttgcaaaatctctttcagatggatatttagttggttcaagaggctcagttggctcatcttttgcagctactatgagtgatataacagaagttaatcctcttccagcacattatatttgtgaaaacgaagactgtaaatattcattcttttatgaaataggtgaatggggctcaggtgttgatttaccagacaaggattgtccaaagtgtggaagaaaacttgctaaaaacggtcatgatattccatttgaggttttcttaggttttgaaggtgataaggaaccagatatagacttaaatttctcaggaaattatcagccaacaattcataaatacacagaagaactatttggagaggggtatgtatatagggctgggactataggtactgtagcagaaaaaacagcttttggatacgcaagaaaatatgtggaagaaaataatataagtgtaccaaatgcagaagtacttaggctttcaaatggatgtactggagtaaaaagaacctcaggacaacatcctggtggagttatggttataccagactataaagatgtatacgattttacacctatacagtatccagcaaatgatacttcttgtggtgttataactactcactttgattatcattcaataagtggtagaatacttaaacttgatatacttggacacgacggtcctaccattataaggatgcttgaagatatgactggaataaatataacagaaattcctttagatgataaagagactatgtctctatttacatctacagaagcattaggtgttacaccagaagaaataaactgtcctataggttgccttgctgtaccagagtttggaactaagtttgtacgacagatgttacttgacaccaaacccactacatttgcagaacttgtgcgtatatctggtctctctcatgggacagatgtttgggtaaataatgcacaagacttagttagagaagatatagttggattaaaagatgttatatctacacgagatgacataatgaactatttaatatttaaaggattacctcccaaaatgagttttacaataatggagagcgtaagaaaaggtaaaggtctaaaaccagaacacattgaagaaatgaaaaaaaataatgttccagaatggtatataggctcatgtaaaaagattaagtacatgttcccaaaagcacatgctgttgcttatgtaatgacatcatttagaattgcatattgtaaagttcactatccagaagcattttatgcgacttattttacgacaaaagttgaggattttgatgcagatttaattgttaaaggattagatgctataaaatcaaaaataaatgaaattgagtcactgggaaatgatgcaaccacaaaagaaaaaggtatgttgaccgttttagaagttgctcttgaaatgtatgctagaggaataaaattattaccagttgatatatataaatcagatgcaactgagtttatagttgtaggagaaaaaacattacttccaccaatggcagcaatacaagggcttggaggaaatgcggctataaacatccaaaatgaaagaaaaaatggtgaatttatatcaaaagaagatttgagaaagagaacaaaaatatcaaaaacggtaatagaaactcttactaatcatggttcacttgagaatatgagtgagagaaatcaattgtcattgttttaagttagcccaaaaagttgcaaataaaagaattttatgatatcatagtatagaaaatagtatactttgcagaaactaagagtgagacagctgttctcactcttttattttaaatatattattaaaaagttggtttatttttattaaatatattttatttaagattatataaactaatcatttacaattgaataggaggaactttaatgaaaaaaaatttagaagctacaattgaggagattgtaactaaaataacggatgaacatggatttgaaatggttgatgttgaatatgtaaaagaagcaggagaatactacttaagagtatacatagataaagaagaaggaatatctttaaatgaatgtgaattagttagtagagaattaagtccaatactagatgaaaaagaccctataaaagaaaattactttttagaggtatcttctccaggacttgatagagcattaaaaaaagacagagattttgttagatatcaaggtagagatgtagatttaaaattatataaaccattaaatggatgtaagcaatttgaaggtgaacttgtaggattaacagaagataataatataaaaatcattgcaaatggtaaggaaatggaatttaatagaaaagatgttgctattgtcagattagcaataaagttttagtggtatattaaatagggaggatataaaaaatgaatcatgaatttatggaagcattagatgaattagtagttgacagaggtatagataaagaaatacttatagatactatagaacaagctcttttaactgcatacaagaaaaactttggttcagcacaaaatgttagagttgaatttgatagagacaagggagatataaaagtattttctcaaagagttgttgttgatgaatcagatttatatgatactttcttagaaatagagttagcggatgctagagagataaaccctaattatgaattaggtgatattatagaacatgaagttacacctaaaaactttggaagaattgcagctcaaacagcaaagcaagtagttgttcaaagaataagggaagctgagagagaaatagtgtataatgaatttatagaaaaagaaaatgaaatagttacaggagaggttgctagagcaaataaaaatgttgtttatgtaaatcttggaagaatagaaggtataatgactcaaagtgaacaaataccatttgagaattataaagcaggtcaaaaaataaaattctatatacttgaagttaaaaagactaacaaaggacctcaaatagttgtatcaagaagtcatccgggtctagtaaagagattgtttgaagaagaagttcctgaaatatatgaaggaatagttcaaataaaatctgtagcaagagaagcagggtcaagaactaaaatggcagtaaaatctatagatgaaaaaatagacccaattggagcttgtgttggaccaaaaggacttagagtaaaaaatatagtggatgaacttggcgatgagaaaatagatataataaaatatagtgaagacccagcagagtttatatcagcagcacttagcccatcaaaagttgttagagtagatatagatgaagatgaaaagtctgccttagtaatcgttccagattatcagttatcgcttgctataggtaaagaaggtcaaaatgcaagactagcagcaaaattgactaactggaaaatagatattaagagcgaatctcaagcagaacaagaaatgttaaatcttgaaaattccaaagaaatagaagctgaggatgttgaagctgaatttatcgaccaagaagagttaggtacttcagaggataattttagtgaagaagagtaaggagggatgattttgaaaaaagtaaaaaaagtgcctcaaagaaaatgcatagcatgtcaagatagagactctaaaaaagagcttataagaatagttaaaaataaagaaggaaaaatatttttagacccaacaggaagagccaatggaagaggagcatatgtatgtaaaagctctgaatgtctaaaaaaagctataaagagtaaagcattaaataaagcttttaaaatagatgttccagatgaagtctatgataatctacttatggagttagaagaatatgaaaaataataaagaaaaagtactttcgttcttagggctcgcaactcgtgcagggaaaatagtgtctggtgatgattcaactttgcttgaccttaaaaaaggaaaagtaaatttgattttaatcgcagaagatgcatcaaataatactaaaaaactttttaaagataaatcaacttttagaaatattccatatctatttttttcaacaaaagaggaaataggatttgcaataggaaaatctccaagagcagttgtaggaataaaagatgaaaatttttctaaaaagataattgaactaatagaaatttaaaataaaatagggggtgatcttgtgtcaaaaacaagagtataccaaatagcagaagaattaaatatatcaaatgaagagcttataaataagttagctgaattagatataaatgtaactgacaaagattcagtattagaaggtgaagagttagaattagcacttgaaatgttaggtgaagatttatctcaagaaaatggaaatgttatagaaatagatggaaagttgacagtacaagtattagcaacgaaattagataaatctccatcagaaataattatgaagcttatgaaaatgggaactatggcaacaataaatcaagagataagttttgagattgctgctttggctgccaaagactatggatttgaattaacagtagctgaaagtgatgatacagaagctttagaaatagaagctttaatggaaattgaagaagataaagaagaggatttaaaacctagaccaccagttgttacagttatgggacatgttgaccatggtaagacatctttactagatgcaataagaaaaactgatgtgatttcaggtgaagctggaggaataactcagcatataggtgcttcagaagttaaaatcaatggacacaaaatagtatttttagatactccaggacatgaggctttcacatcaatgagagcaagaggagcacaagttacagatatagcaatattagtagttgcagcagatgatggtataatgcctcaaacagttgaagctataaaccatgctaaagcagcaggtgtacctttaatagttgctattaataaaatagataaaccaggtgcaaacccagataaggttaaacaggaattagcagaccaaggattattagttgaagactggggtggagaagtaatagcagttccagtatcagctaagaaaaaagaaggaatagatacacttttagaaatggtattattggttgctgaaatggaagagttaagagctaatccaaataaaagagcagtaggaactgttatagaagctgagcttgataaaggaagagggccagttgcaacagtacttgttcaaggtggtactttaacagtaggtgacccaatcgttgcaggtgttgcatgtggtaaagttagagcaatgataaatgcaaaaggtaagagagtaaaaacagcaggaccatctacagcagttgagatattaggtctatcagaagttccacaaggaggagaccaatttgtcgaagttccaactgataagattgctagaagtgtagcagcaagaagacaacaaatagttagagatgaaatgttaaaatcaactcaaagattatcactagatgctctatttagtcaaatgagtgaaggttctataaaagaccttaatatagttataaaagcagatgtacaaggttcagtacaggcagttaaacaatctttagaaaaattatcaaatgaagaagttcaagttaaagtaatacatggtggtgttggagctgtaacagaatcagacatattacttgcagcagcttctaacgcaataataataggattcaatgtaagaccagttccaggtgcagaatctctaggagaaaaagaaaatgttgatataagaacatatactataatatacaaggcaatagaagatatacaagcggctatgactggtatgttagaccctgaatatgttgatgaagaaacaggaaaagctgaaataagagaaatatataaaatatctggtgttggaacagtagctggatgttatgtgactaatggtaagatatttagaaattgtaaagtaagattagttagagatagcataataatacatgaaggtgagcttgcagcacttaagagatttaaagatgatgtaaaagaagttaattctggatacgaatgtggtatgagttttgtaaattataacgacataaaagaaggcgatatagtagaagcttatataactaaagaagtagaaagaaaattataaattcgtatcaaagaaaatcagttagtaaagaaggtcgatggtatggcatcatataatagaacaagaaggatagcagaagaaataagaaaagtcgtaagtactatgcttataaatggagtaaaagaccctagaataacatctatggtgagtgtaactgatgtagaagttacaaatgacctaagatatgcttatgtatatgtaagtattctaggtggagatgaagaatccacactaacaggtcttaaaagtgctggaggatatataagaagagaagtaggaaaaaatataaaacttagatatattcctgagatagtatttaaacttgatgattcaatagaaaaaggaatgtatatggataaccttataaaaagagttaatgaaaaaaatgctcaacaaaatgaggatgaaaattatgatgaataatatggatagtattataaactatatttatgagggtgactattttatagttacctctcatatcagtccagatggagacaatgttggttctacactttcaatgtattatacattgaagaatttaggaaaaaatgtatattatgtacttgatgatgaagctccattaaatttaaggtttttggttgaaggtgtaaaaatctataagtctaatgaatttaatatgaagaactattctttaattgcacttgattgtggggataagatgagaatatgtgtgagtgatgaaatcaaaaataatgcatcaaaattaatctgtattgaccatcatgctagtaatgattcatatggagatttaaattatgtagatattgatgcatcttctacatgtgaactagtttataatttattggttagatttcagcaaacaaaagatattaatattataaatgaagatatagcaacatgtttatatacaggtcttgtaactgatactggaaacttttcgtattcaaatgtacatgcaagtagttttgaaatggcaaaaaatttacttgttttaggtgcacaaaaaaatactataatacaaaatatatatcaaagcaattcttctgattattataaattattaggagaagctctaaaaggtttggagatatttgattcaaaggtatctagtatagttttaactcaagacatgatgaatagaaataatattagctttaatgatgttgatggaataacaacatatacaagagatataaaaggtatagaagttggaattttatttaaagagaaaaaacaaaatgaaattaaagtgagttttaggtcaaaaaattatgttgatgtaagtgaaatagccaagttatttggcggtggtggtcatgtaagggctgctggatgtactattagagatagtattgataatgcaaagaaaatggtactagaggcagtgttaaaatcaatttaaggtgacagtaaaatgaataagattataagtatattgaaacccacaggtatgacatctcatgatgttgtaagtagagtgagaaagattttaaatataaaaaaagttggtcatacaggtactcttgacccagatgcttcaggtgttttaccaatctgtatagggaaagctacaaaagtatgtgaagttattttaaacaaagataaatcgtatatatgtgagcttactttaggtataagtacagatacttatgatgcttcaggtgaaattttaaaaaaagttgatgattttaaatttagtaatgaagacatagaaagagcttttgatacacaaagaggagagataaatcaacttcctccaatttattcagctttaaaggtaaatggaaagagaatgtgtgatttagtaagaagtggtagacaatctgaaattactttaaaaacaagaagagtaaatataaaagacataaaaatactaagtataaaaggtaataaagtaatgttttatgttgagtgttctaaagggacttatgtgagaagtatttgccatgatataggagaatatctgggttgtggagctcatatgtcgtttttgaatagaacatcttctggtaaatttgacttagataattcaataacattagaagaattagaattattttatgaaaataaaactttagacaaatacttatatgatatagattatgtccttgattcgtttaattatgttgtattaaaccctaatgctataaaatattatagtaatggtggctcaatagatgataaaaggtttttaaaaaataatttcgataaagatgatgaagttgtaagagtatacagtacagataatttcttaggattaggaaagttatcaaaacacaataatacaataagtgttaaaagtgataagatgttcatataaccaatgtatttaaaaaaacaacaaaagagatagtactataataacttctatagtctatctcttttacttatgctataatagtttgtgaataagttaagagtaaattatattttagcggggaacatttattatggtgattataaaatctataaaagaaatagcaaacataaaagaaagtgtcattaccataggaaattttgatggtgtacacaaaggacatcaagttcttataggaaaaacagttgaatatgcaaaaaaagaaaatatacagagtattgtatttacatttgcaaatcatcctgtaaattactttagaccaaactcaacaaaaaatattataagcaatgatgataaaataaaattattagaagatttgggaatagatatagttgtaatcataccatttgatgagtatatgactaaaatacctgcaaaggatttcgtagatgagatactagtaaaaaaattaaaagctaaaaagatagtaattggacatgactttacatttgcaagggcaaaagaaggcaatgttaatctattaaaaagcttagaacatgaatttggttttgaggtagaagtaataaaacccatcaaaatcaatgatgtaagagtgagtagtacttatattagaagtttagtatcccagggtgatatggctaatgtcaaggaatatttgggtagaaattacaagttagaaggttgtgttatacattctaaacaccttggaagaactataggattcccaacggcaaatattgaccttaagaataatatgctcgttccaaagagaggtatttatgcttctattgtacatattggagatgagacttattttggtgctacaaatgtaggctataacccaacagttaatggaaaaactttgtctattgaaacaaatattttagagtttgatagagatatttatggggaaaatataattgttgaatttttggaaagaataagagatgaaagaaagtttaattcaatagatgacttaaaaaatcaattgtataatgatacaaattatgtgtatgaaaactatgtttgcaaaaacaagtaatgtatgataaaatgattaaggaaaataaccattactcggcatttgaatactccaatcaatgcttagtaataggcgtttctaaaaaaatacggaggtaatctaaatgataaacaaatcagaaataataaaagaatatggaagagctgaaggggatactggttctccagaagtacaaatagctttattaacagctagaataaacgagttaaatggacatttaaaaactcataagaaagaccaccattcaagaagaggactattaaaaatggttggtagaagaagaaacttattagcttacttaaaggaaaaagatcttgaaggatatagagcattaatagctaaattaggattaagaaagtaatttcattctttataaaaaagcaggtatagtgtatacctgcttttttatagttaattcattataaagtaaaatagttaataataaaagtagtttatatgttataaaaaattataaaatgaataatattgggtaagaatattaaaatagtatacaaatacataatcaatttaaaaggaaagacaggataaatatagaaattttataacaggataattagttggaataaggaggatattattttgaaaataaagttagtatgcgatagtttgtgcgatattccagatgaaatatcagaaaaagattatatagagatagttccacttacagttatttttaatgatagggaatatatagaaggagtagatataaagaaagaagagttttataaaaaagtaaaagaaatcaagcaaatacctaaaacttcacaagctacatatatggagtttaaagaagtgtttgataagttcataacagaaggttatcatataatctgtatgacaggggctgcaaacgcatcaggaacttttcaaagtgctatgatagctaaaaatgatgtaaatgaaaatgaaaaaatacatatatttgatactagaaatttatctctaggtagtggacaatatgttataaaggcatgtgaacttcttgaagaaggactgggatttgaagaaattatagatgaattagaaaatactcgcagtagtgtaagattactttttgcaccatatacacttgattttttaaagcagagtggaagagttccagttgcaactgctttgataggaaatatgttaaatataaagcctatatttttctttgataatggggaagctaagttggtaaataaggttagaggaataaagaatatagcaagtaaactggtcgatataattttagaaatgaatgaagggtctttagaaggaaaaatcgtcacaataggttgtggagataatttacacgattgtgaaatattaaaagatgaagtaaataaaagaataaaagcaagaagagtattatttactcgaggaggagtttctatttgctctcatacagggccagatatattggctataagttgttctaattagtagtaatataaggtttttgcatatatatgtgaagataattttatattgttaatttatagtatttttgataatatagtaaatagagtgatatacgtgttttttaataagaggaggacaagcattaatgtttgaacataaaatatttaaaatggattttgcaggaagagaactttctgtagaaataggaaagatttgtgaaatggctagtggtagttgtatagttcgatacagtgacagtatggtaatggtaaatacaactaaatcagccaaacctagagacggaatagacttttttcctttaagtgtggattatgaagaaaaattatactctgtaggtaagatacctggaggttttttaaagagagaagggaagccttcagaaaaagctatacttacatcaagattgatagatagaccaataagacctttattcccaaaaggatttagaaatgatgttcaggtagttgcaacagttctatcagtagaccaagattgtacaccagatatagtagcaatgataggttcttcaatagccctttctatatcagacataccatttaatggaccaacaggttcagtatgtgttggccttgtagatggtgcatttgttgtaaatccaaacgcagagcaaagagaaaaaagttcaatgcatctagttgtttcaggtacaaaggaagcaataatgatggttgaagccggagctgatgaagttccagatgaggtaatgcttgatgctattttatttgctcaccaagaaataaaaaaaatagttgagtttatagaaggtatagttgcagaagttggaaaagaaaaaatgcctgttgaattataccatgcaggagaagaaataactcaattggttcgcgaatttgcaactgataagatgaaaaaagcagttcagacttttgaaaagttagagagaatggaaaatatggatagagttaaagaagaaactttagctcactttgaagaaactttagaagattttgaagattttgttggagatatagaagaagtattacaagatataataaaagaagaagtaagaaaacttatagtacatgaaaatgtaagaccagataatagaaaacttgaagaaataagacctatatggtgtgaaactggcatgatacctagagctcatggttcagccatatttactagaggacaaactcaagtacttaatgttgctactttaggtgctttaggagatgttcaaaaattagatgggttagatgaagaagaaaacaagagatatatgcatcattataatttccccgcatatagtgttggagaagctagaccatcaagaggaccaggaagaagagaaataggacatggtgctttagcagaaagagctttattaccagtaataccatctcaagaagaatttccttatgctattagattagtttctgaagtattaagttcaaatggttctacatctcaagcaagtgtatgtggctcaacattatctttacttgatgcaggtgtacctataaaagatatggttgcaggtatagcaatgggacttataaagcatgatggtaaggttgcagtgctttcagatatacaaggtatggaagaccatttaggcgatatggactttaaagtagctggaacagagtatggtataacagcaatacaaatggatataaaaattgatggtatagataaagaaattctacaacgtgctttaaaacaagctaaagagggtagaatccatatactaggagagatgagaaaaactatatctcagccaaaaccagaactttcaccatatgcacctaagattgttaaaatgcaaataaatcctgacaagataaaagatgtaatagggcctggtggaaagataataactaagataatagacgaaactggagttaagatagatattgaacaaactggggaagtatttatatcaggtattgagattgatatgattaagaaagctcaagaacttataaataatatagtagttgaaccagaagtaggaaaaacttataaaggtaaggtaagtagaataatgaactttggagcatttgttgaaatacttccaggaaaagaaggattacttcatatatctcatatagctcatgaaagagttgccaaagttgaagatgtattgaatataggggatgaagttgaagttaaagttacagagattgatgaaaaaggaagagttaatttatcaagaaaagttcttttaccaaaaccagaacataaaaataaataacttattatataattaaaagcaaagtcttaggattttgcttttttaaatacaaaaaagtagataattttaaaatgatagttatggatggcttatagttctttttctgtaaggctttactcttataaagaagctatttaaaagctgattaatagaaagctttattgatatatatagaatcacttaagttatatttagtgcataaacagagcttatttttaatagtattaaataagaaacaatttgtacataattagggggagttttaatgataatgatggtacttaataagagtaagctcaaaaaaatcataatactaattttagtagtgttattagtattatcaggaggggtaatggtattaaagttatttaacaacaagccagtatttaatttatttaatggtgtagatttaccatatgaaagaggtacaaaggataaaagtggatatgttgcattaacctgtaatatagaccttggatgggaaacagagtacgtagaatccattttagaaacacttaaaaaagaaaatgtaaagattacatttaatgtaactggaaaatgggcagaaaagaataaggatgaattattaaagataaaaaaacaaggacatgaaataggtaatcatggatataaacatttagattattctacattatcatatgaagacaattatgagcaaatagagacctctaaaaagataattgaagaaattataggtgaaaaaactaaattttttcaagcaccagcaggttcctttggtccagaaacagtaaaggctgctaaagcattagggtatacttctatcaaatgggatgccgatactatagattggaaatacaaagaccaaccagaggtaatcattgatagaatgaagaaaaaagacattaaagatagtagtataatcttaatgcatccaaccaacgcaacgacaaaatgtatagatgatattatagctattgtaagagaaaaaggactaaaaccagggaaacttagtgatgtatttaagtagacaaagtataaatatttggttaagattgtataagttgtagttgaattaattaaaagactgacttataatgtaatacatataaaaaataaatataattaaaacatagtgttttcaataatccaatatgaaacaaagaataaattgttaggagaatgtaatgtataagacaaaaatactggaaaatgggcttacaataattggtgaagaaataccatatctaaagtcaataacattaggtatttggataaatgcaggctctaggatagaagaagcacaggtgagtggaacttctcattttatagagcatatgatgtttaaaggaaccaaaaacagaacatcaaaagagattgctagttcaatagataatttgggtggtcaaataaatgcatttacaagtaaagaatgtacatgttattatgtaaaactaatagatgagcatatagatacgggaattgatgtattgagtgatatgatactaaattctaaatttgataaaaatgatatagataaggaaagacttataatattggaagaacttaagatgtatgaagactctccagatgacttatcttatgatttattagtggaaaatatatatgctaatgatggattaggaatgaatataattgggacaaaagaatctctatacaatataactagagaatccatgttagaatacttaaataagtattatattccaaataacgctgttatttctatagctggaaactttaactttgatgatatggtggagaaaatcaaatcaaaatttggacactgggaaaagaaaaatttgagtatagacataagtgaggctaagtttaatccttgctttatatcaaaaaataaagatactgaacaggtgaacttagctatctgcctaaaaggtattccttttgaaaatgatgaagaagtctactcaatggcagtggtaaataatattttcggtggaagtataagctcaaggctttttcagaaaataagggaagaaaaaggtttagtatattcaatatactcatcacagacattatataggaaatgtggtgaattaggcatatttgcaagtatgagtacagaaaatttacaagatgtatataatttaataaagaaagaaattgaaaatataagagaaaactatcttacagaaaaagaaatatctgaaagcaaggaacagttaaaaggaaattatatattggatttagaaagtactagcagtagaatgatgtctactggtaaatctatgttacttagcaaaaaagtaaaaactacagatgaaatacttgaatgtataaataatgttaatattaattcaataaagaaggttgttgataaggtattcaatatcgaaaatattggtacatgtatagttggaagagatgtagaaaagattctacacttggattaatattgaaaaaagtaaatctctggaggtataaaatatgaatttatctgaaatagcaggtaaggaaatagttaacttggtcacaggagaaagattgggggtcattggagaatgtgaccttatactagatgaaactacaggcggtatattagcgcttctaattccaaaggaaaaaggattttttgccagaagaaaagataagtcatttttagaagtaccatggagaaatgtaaaaaaaataggtaatgacatgataattatagaatatgagggatatatttaggaggaaaaaatgagtattttagtgcaaaagtttggtgggacatcagtagaatcatatgaaaaaatgaatgaagtatgtaagatagtaaaagcatacaaaaaaaatgatgaagaattacaattagtattagtagtttcagcaatgggaagaaaaggagctccatatgctacagatacacttataaatttgtgtagtgcagtaaatgatgagccaagtaaaagagaacttgatttaataatgtcttgtggagaaataatatcaggaacaattcttgctaatttattgaatgcacaggggatagattctgttttctttactggtcagcaagcaggtataattacaagtgatgaatattctaatgcaaagataaagtatataaatcctaaaaaggtaaaaagagctttagatgatggtaaggttgtagttatagctggattccagggtgtaacagatgatggagaaataactactcttggaagaggaggaagcgatacatcagcagttgctattggtaaagctttagaatgtgaaacagttgaaatttacactgatgtggatggtataatgactgcagaccctagagtagaaccaaacgctaaagtattgagttttatagattatgaggaagtattccaaatggctgacaaaggtgcaaaagtaatacatccaagagcagtacagttggctaaaagtggaaatataactttagccataaagaatacaatgaatccaacttttgaaggtacaaaaataggttctttatgtagacacttagaagagaatatagaatatgaacaagaaagagattttaaggttgctgttgcaaataaagatagtgtagcacaagttaagattaaatcagcagaagaagtgtttacagaagtattaaatgagatagaaaagaaacttataactatagatatgataaatttctttatatcagaaaaagcatttgttgtagaagatgctgatataaaatcattaaaggaaatactagataaatttgaattagattatgaagtaaatagagactgtgctaaggtaacattgatatgttcaagaattgctgatgaaatgtctggtatcatgtcaaaggtagttagaggattatcaaaagcaggggtatctcttttacaaacatcagactcaaatatgactatatcttgtttagttagtgaagaagatatgcatacagcagtacatgctatacaccaacaattttatttaaaataaactgtataatacaattattttttaatcaaatttaagaatttcatatatatcttaatatatttgatttatttggtaaaactaaattaaatataattttgataggagtttttttatgaaagattatagagaagataatgaaagatttgataaagataattgtagtgaagaatctagttgcgaagagagagaatgtataaagcaatttggtaccaatgaaatgccacctcaacctcctaaagatattcaatgtataactataattggagaaattgagggacattttataggaaatcctcaaaaaaaagctacaaagtacgagcatataattccaatgctatactcaattgaggaaagcaatgatgttaaaggagtgttagttgttttaaacactgttggaggagatattgaagcaggtttagctattgcagaacttttaaacagtacatctaaaaaagtagttactcttgttctaggaggaagtcatagtataggtgttcctcttgctacagcaggagattactcatttatagcaccaacagcaaccatgattatacatccagtgcgaactactggtcttgtgattggtataaatgagacttttgaatattttaaaaagatgcaagatagaataattcaatttataataagaacatcaaatatcaaaaaagatgtacttgaaaaacttatgcatgaaaaagatgaacttgtaagtgatgttggtagtgtattaataggaaaagaagctgtggattatggtcttatagatgaagttggaggactaaaagaagcacttaaaaaattaagagagcttataaaagaatctgaggaagaaaaaaataatgattaaaatttgtttaaataataaaatttatgatataatgatgtaataaagtaggagtgttagtgttaaggcattagcactttttgctgtgaaggggtaaaacttgctaaaaataaggagtgatattaatggccacgaaaaagaagaaaaaaaagaaggtaaataccttaagttttaatgcagaatatcataatttaataacaatatttataggtgtatttttattatatagtttaaattctaattctatgggatggatacctgtgttaatgcaaaatctttttaagggactatttggagggctttcaatagcaataccatttatagtaattataacaggacttttaggattttttgatggaaatgaatatatatataggctaagaaagactaaactatactacataattattttatttatatttgtattttatggattattaaatgcaggaactcttcctgtagatagcccactaaaaggtaacatgtttgatgatgttatgaaattgggtgtaagtggacaaggtagtggtttgatagcaacaactattgcgtattatatgagtaaaatatttggtatagcaggtggatggttaataagtatcttcgcacttatactttctgtaatgtttatatttaatatttctataaaagatttggtgtcaaatgcaaaatcaaaatctaaagcatctaaagacagcaatttaacgtttaaagataaaattgcaaatatgaaaaaatctgcaatagatatgatgactgatgaagtagatgatactactataaataaaaaaccaggtttctttaaagggttaatgtcaaaaggtcttaataatgatgatgaagaagatgaatattttgaagaagaaaatagtgatggtgtagatgataaaactataaaaatagttggatttaataaggcagaagatgagtatttagaaatattagaaggaactcaaagtatgccagagttagatgttttaaaagaattacaaaaagctaccaatgaaaatccagttgtagatactaaaccagaaaaaaaagttgatatagctaaatctaatttaaatatagaaaaaactcaacctatgagtattgtagcagagccagttaatgaggattattcaaactataaaaagcctagcattgagcttttaaataaagtaaataagaagtctgatgaaaatggtaaaaagaaagtgttgaaaaatgcttctcttttagaaaagacactatcagattttggagtggaagcaaaaattaatcaagttacagttggacctactataacaagatatgaaatacaaccaagtccaggagtcaaggtaagtaaaattgtaaatttaactgatgatatagctttaagtttagcagctaaaagtataagaattgaagccccaattcctggtaaaagtgcaattggaatagaagttccaaatgaagaagctcaaatggttggtgtgagagaagttctagaaagtgaagaatttaataattttaactctcctcttgcaatgggacttggaaaagacgtagcaggaaaaattataattggagatataggtaagatgccacacttactaatagctggttctacaggttcaggaaagagtgtgtgtgtaaatacattaataagtagtattttatataaggcaaatcctgatgaagtaaaattactattaatagacccaaaagtagttgaacttgcaaattataatggaataccacatctattgataccagtagttactgaccctaaaaaagctgcaaatgctttaaattgggcagttacagagatgaatagaaggtataaattatttgcagatgctcaagtaaaagatgtaacaagttataatgagaaagcggaagaaaaacttcctaaaatagtaataataatagatgagttagcagatttaatgatggcaagtgcaaatgatgtagaagattatatttgtagattagctcaaatggcaagagctgctggaatgcacttgattgtagcaactcaaagaccatctgttgacgttataacaggggtaataaaggctaatataccatctagaatagcatttgcagtatcatctcaaactgattcaagaacaatccttgatatgggtggtgcagagaagcttctaggtaaaggtgatatgttattctatccacttggtgcagcaaaaccagttagacttcaaggggcattcatatcagagagtgagtcggaaaaagtaattgattttgtaaaaagtcaggttaaagatggaataaaatatgaagaagatataattgaaactatatctaaggttaatacttcaaagagtagtgatgaggatgagtttttgagtgaagcgatagaatttgtcgtggaaagtggtcaagcatctgcctctatgctacagagaagatttaaaataggattcaatagagcagctagacttatagattctatggaagaaagaggcataattggagcaagtgagggaagtaaacctagaaaggtattaataagcaaacaggatttgcagaatttagaaggtgaatagaattgtcagttataaaaatagaaaaagcacttaagctagataaagtaatatttgtagatgtgagaactgaaggagaatatgaagaagaccatatattgaatgcaatcaatatgcctctttttaaaaataatgaacataatgaagttggaacaatttataagatgcagggaaaacatgaagcaatacaaaaagggtttgactatgtatcgtataaattaaaggatatatatttacaagcagcagaacttgcattaaattatgataatattgtcatatattgtgcaagaggcggaatgagaagtggaagtatagtaaatttattatcatcattaggtgtaaatgtatatcaacttgaaggtggatataaggcttatagaaattttgtattagagtatctaaggcatgtaatggatacaaaaaactttgtatctgttcatggattgactggtacaggaaagactgatttgttacatttattagatgaaaaaggaatagatgtactggatttagaaggcatagctaaaaacagtggttctacctttggttttataacttttgataaaaagccaccatctcaaaagaactttgaaacaaaactatttgaaagtgtatttttttcgaaagagaattatatatttgtcgagagtgaaagcaaacgagttggaagtgttacagttccaaatgaaattttcgaggcaatgacacgagaaggacatcatatattattagaatgtgatattgaaaatagagttgatagactttgtagagattatatttatgataaagatgaaggtaatatattgattttaaaagaatgtataaacaagtttagaaaaagattgggtaataaagtagtagatgattatattgatttattagaatcaggtgaatataaagaacttgtaaaaagatatcttttagaatactacgacccactttatatgcattcagtagagaaatataagtatagtaagattataaattttaatgatacacaaaaagctttagaagatgttatagacttatatgagagtatattggaaggagaaagtgaatgttaaaaatagcattggaatcattaggatgctcaaaaaatttagtagatgcagaaataatgatgggaattttaaataacaaaggctataaattaattggagattttgaagaagctgatgtaattatagtaaatacatgtgggtttatagagtcagctaaacaagaatctatagatacgataataaacttttcagagttaaaaaaaactggcaatttaaagttgttgatagtaacagggtgtctagcccaaagatattctgaagaattaaaaactgaaattcctgaaatagatgctatagtaggaacaggaagctatcaaaatatagataaaatacttaaagaattaagtgaaatgcatcaaattgtaagccttaatgatatagagtttgtatttaatgaagatttaccaagatatatatctacacctagctatatggcctatttaaaaattggagaaggatgctccaataattgtacttattgtataataccaaaactaagaggtaaatatagaagtagaaaatttgaagatataattaaagaagctaagaaattagctgaatctggagtaaaagaacttgtggttatagcacaagatacgacaaagtatggttttgatttatatggaaaagaaagattatcagaacttttagaagaacttgcaaaaatagatggatttaagtggataagggttatgtattcatatccagaatctataacagaggaattgatacaagttataaagaaatatgataatatatgtagttactttgatatgccaatacagcatgcaagtaacaatattttaaaattaatgaatagaaaaactactaaagaagatatattaaataaaatcaatctgataagaagtaatataccagatgctatacttagaactacgataatagtagggtttcctggtgaaacagaagatgacttcaaacaacttgtggactttgttgaagaggttaaatttgatagacttggtgcatttgcatattcaagagaagaagatacaccagcagatagattgccaaaccatatagatgaagaagtaaaaatacaaagaagagatactttaatgatgattcaacaaaaaatatctgaagaacttaatgacaaaaagataggaaaaacttatgaggtgttaatagaagaacagatagaagataatgtatatacaggaagaacacaaggtgatgcggaagaaattgacagtatagtgtatgtaaaaagtgtagacaatcttgaagtaggagaatttgtaagtgttcaaataaatgatgcaatggaatacgatttaatgggagatgttttatatgaacttgcctaacaagttaactttgtttagaatatttttaataccagtatttgttttaattatgttgctcaatgtaccaaataaatttttaatagcttgtattatttttataatagcttcaattactgatgctttagatggaaaaatagctagaaaatacaatctagtcactgactttggaaaatttatggacccattagcagataagttattggttatttcagcacttacatgtatgatagaagaccatcttgtaagtagttggatggtaattataatagtggctagagagcttacagttagcatattaagagctatagctgctgctgatggaaaagtaattgctgctggaaacagtggaaaacttaaaacgataactcaaatggtatctatagtgtttttattgttaggcgctcagtttgaaaatgtattgatattaaatattggtgaaattctcattcttatagctacactacttacattatattctggatgggaatatctatataaaaataaagagctttttatgtcttctaagtaaaaaattatgctttaataaataaaaactaatgattaataaataaaaaataacaacttaaaattttaaaaatgtaaaaaagggtatactattatagtatacctcttttcattttaagaatattttcttttgtgtatataattattaataatggtttataaataaaatgtaatgaataaaaatataatcattagtagcgtttttaaattgactaggtttgatttatgttatataattaatatataacaagagaacaaatgtttgtagataaatgaagggatggtatagagatgagtgtagatcaagaaaaattaaaagcgttgaatgaagctttaggtaaaattgaaaaagattttggtaaaggttcagtaatgaaattgggagaagcaacatctatgtctatagatgttatatcaacaggagcgattggtttagacatagctattggtataggaggtctacctagagggagaatagttgaagtatatggtccagaatcttctggtaagactactgttgcgcttagttgtgtagcatcagctcaaaaagatggaggaatagctgcatttatagatgcagaacatgcacttgacccagtatatgcaaaagctttgggtgtggatgttgataacctaataatatctcaaccagatacaggtgaacaggctttagagatagcagaggcattgataagaagtggagcgatagatataatagtaatagactcagtagcagcattagttccaaaggctgaaatagatggagatatgggtgattctcatgtaggtttacaagctagacttatgtcacaagcacttagaaagttaactggttcaattaaaaaatcaaattgtgttgctatatttataaaccagttaagagagaaagtaggaataatgtttggaaacccagaaactactactggaggacgtgcactaaaattctattcatcagttagattggatgttagaaaaatagatacaataaaacaaggtgataaagttataggtagtagaactagagttaaagttgttaaaaacaaagtagcaccaccatttaagcaagctgaatttgatataatgtatggagaagggatttcaaaaattggagaccttttagatatagctgctgatgtagatatagttaaaaaatcaggttcatggtatagttacaatgatactaaacttggacaaggaagagaaaatgttaaaaaattcttggaagataatttagatttaactactgaaatagatgagaaagttagagcattttacaatttaaatgaagaacatgaagaatcaggtacttcagtatcaaaagaaattgtagaagaataagtaaaaatacaaaaaaataactagtaattaaagacatgccacgctccctattagcttgacacaatgttgaaaaaattataaaattaagtgaggataaaatatctaaatttaattttaattattaggaatattttttaatcatagtgatgacattttgggattattaacgaaggaggtggatgtcatagatagtgtagtaatgattgtaataggtgcagctgttggtattatagctggatattttgttagaaaaaatatatctgaagcaaaaattggacaagctgaaaacttggccaaagaaataatagataaagcacaccacgactcagaaacagtacaaaaagaaaaattactagaagctaaagaagagatccataagtggagaacagaagctgaaagagaaaacagagaaagaagaacagaagtacaaaagtatgaaaaaagagtagtacaaaaagaagaagtcttagatagaaaattacaaaatttagaatctaaagaagtaaacctaagtgaaaaattaaaggtagtggaaaagaaagaagaagaagtcgaagtaataaaaactcaacagttagaaaaattagaaagtatatcaggaattacttctgataaggccaaagaaatcatcttaaccaatgcggagagagatgtaagacgtgaaatgtctataatgataaaagagatagaaagtcaagctaaagaagaagctgataagaaatcaagagaaattataggatatgcaattcaaaaatgtgcagcagatcacgtagccgaaactactgtaacagtagtaagcttgcctaatgatgaaatgaaaggtagaataataggtagggaaggtagaaatataaggactttagaaaccttaacaggtatagaccttataatagatgacactccagaagccgtaattttatcaggatttgatccaataagaagagaaattgcaagaattgctctagaaaaattaatagcagatggaagaatacatccagctagaattgaagaaatggttgaaaaggcgagaaaagaagttgacaatattataaaagaatatggtgaacaagctgcatttgaaactagtgtacatgggattcatccggaattaataagattattaggtagacttaactatagaactagttatggacaaaatgtacttaaacattctatagaagttgctcatatagctggtataatggctgctgaaataggagcagatattagattggctaagagggcaggtttattacatgatataggtaaggctgtagaccatgaaatggaaggtacacatgttgaaataggtatggatttacttagacgttataaagagtctaaagaagttatacatgccatgagtactcatcatggagattacgaacctcaaacagtagaggctgtattagttacagcagcagatgcaatatcagctgctagacctggtgcgagaagagaaactttagaagcatatataaagagacttgaaaaattagaagaaatagctaattcatatgaaggtgtagaaaaatcatttgctatacaagctggtagagaaataagaataatggtaaaaccagaagctataaatgatgaagaaatacatctattggctagagatatgactaagaaaatagaggatgaacttgaatatcctggacaaataaaagtaagcataataagagaaacaagagctatagagtatgcgaagtaaaagaaataatatctaaataataagaaaatatttttagaaatttaaatttgccacaagatatgataatatatcttgtggcttttaaattgtttaagtttaattttatataatgcaaaaataatctaagtgctaaaagtgctacttacaaaagattaataaaataaagctttatatatgtattatttatataattatccaagtttgtttgatataatgaagttgtaaaatcaatactttactacaaaataaatagtaaatactacagtaaaatctaaaaataggatataatagtattaatataagaagattataaataaaacctgctaatgaaaatagattatttttagcaggtttttaaattttttataataaatcttatttttagtcaacaagatttattttttttaaaactttacttactattttaaacattaattatgaaatttatcattttattatttacagaaagtattctataacaataaatatctatatttattgcaaaattattttagcagttttgtatttatttgtatttattttgaatttatttactaaatttgcctataaaaagtatatataaaaatatagttcaaaatggtataattaagtataacagaaggaggtaatgtaagtgagccaatacataaatataaattctcagttagacgccctaaaattgaaggagttcgagaaaatattttacgaaaatatcaatgaggacgttaaagtagtgccaaaagttactccttttaaaggaataaataccgatttgttgtatgttaaagatggaagaattttatttataaaatttatggatacaacagaagatatattttttattttagaagaagagttacttgaagttatgaatgaggaatatgaacttttgaaactaaaaatgggacaaaagaatagaaatataagttataactacgtttacattatgccatacgttgaagttgaggaaacatatgaatttgaagaatttgttaataataatataatagataaaaataagcttcaagatataatgaataagggttcgctggaggagtatcttaatgatgagaatgatgaaataaacttaaatttatttttactagacatatgttcagaatactatataataaatgataaacttcatctaaatgaaaaatttaaaaaaatttcattctacaatgatgactataagtatacagcaactatgatggaagacgttcaaattaaagatgttgtttctattaaatatgggaatacacttattgaaggtggttctggtataggcaaaacagcaattatgctttctagggctataaaattagcaaaagtatatccacatcataaattagtcatatttacacatacaaaacaattgtgcaatgagcttcgagagaggatagagttattatacaaagataataacaatttagaagttcacacatttagttcttttatatttaaactagctaaaaaattcaatttaattgtagattataacatgttaaaaaatgattacgaaaagacctttaataatcttgtaaaacaagcacagaacattataaaaaataaaaatatgttcaaggctatttttattgatgaagcagaaagctttttagagtatgaaatagattttataagggagtttttatataaaacaaaattcatatttaatgtgtgttcttgtaactccttgaatatctctaatagattgaatatatttaaaaaattatataatggtatagaatttgatgataagattatcttaagtaaaaattatagacaagctaaagagattgtagattttacaaataaattttcaaataattctaactcatatatcaacgaattaagaccaaatacagaatttagtactttcttttatactaaagcacttagaggtggaaataagtctgttgatataataaaagtaagtgaccttgatgaccaaataagttctgtaatctgggaaattgagtatttaataagtaaaaaaggtcttgattattctgaagttgctatcgtttatccttataataagaagaaattaaaaagtggaaaaaccatttactttcaatatatgttaaaaaaagcattggaagaggcaaaaattccttatatatgtgcagaagataatttgacaaatataagtaagaaggtaggaactacaatagcaaatatatatgcaataaagaatttagagtataaagcggtaatagtatgtgaattagagatgttatacaatcaaactataaatgatattgaacaagattatcaagtaaatgactttgtaggagatttaaataaggtttatttagctatgagtagagcaacagactacctaagtatagtaacaacttttaatgaagaagcaagtgatataataagacttattacagaatcaaaagatatttagtaaaaaaatatttgtaatttaagaaaataaaaagagactgagatttgtaaaataaactttaccaattcagtctcttattttttagtccactttcccaatattatcaagaggtaatagtctcaccataaccttaccaagaatttcatcttcatcaaccatacctacatcagggaatctactatcattactattttctctattatctcccattgcaaatagtttaccttttggaacaacagtatctatatctccagaagtatagttattgtgtatatatggttcatttaataattttccatttacatacactttagaatttgatatttttattctgtcaccttcagtagctataactctttttattaagtcttttttctttcctgtttctccatcaactaaattggttttaaaaactacaatatcgcctttttcaggtttaccaaccttgtatgatatcctatttaaaatcagataatctttatcatctaaagtaggatacattgattctccacttacaacagaaggtcttataaattgtagaattacaaatgcaagtacaatagccatagctattgacttaatccaatcaaatatttcttttttaacactcataacttttctccttatcatttgttattaaattagaatacattataatagaaagaaataagcaagaaccactatacccaagactattctataataaccaaatactttgaagtcatgttttttgatatagtccataaaaaatttaataactacaattgaaacaacaaatgctactacagaaccaacacctaaaataagccattcaaatccagtaaatccaaatccagcttttagaagttttaatgcactagctccaagcattgtaggaatggctaagaagaatgaaaactctgctgctacatatctagaagtaccaagtaatactgcacctattatagtagaaccagacctagatgtacctggtatgagagctagacactggaataatcctatacaaagagctaatttatatgtaacttgagaaaaatctttatacttaggtcttttatttctcttttcaagccctatcattattataccatagacaataagagcaatagcaactactgttgaattaaagaatactctgtctatgtcatcttcaaacagtattccaataactccagatggtataactgcaattataaccttaagccataaacgaactgtttcttttttctgtttaatattctttgcactatcaaaaggatttaactttctaaaaaatataacaagtacagctagtattgaaccaaattgaattacaactaaaaatgtatttataaatgtatttgaaaaattcaattttataaactcattaattaatatcatatgccctgtactacttactggtagccattctgttattccctgaactatgcccaaaatgactgccttaaaaatttcaagcaaactaaatgtttccaaatcaaaatacctccaatacaaatttatagtagcatattttattcatagattaataaaaaaatgccaccttttactaacttataataccatagtactgtgtagtgcacaatggaagattgatattttcataaaaccttcataatataacaaaataaacttaaaagttatctattgaataaggggtatatttgagggggaaatatatggtatagtaaaagtatagctattttattttatgaaaaggaaaggagttattatgtatagtacaaaaatactagatgattatgagtatgaaacttttaatgttttttctacaaaattaaatccaaacacgaaacacgattatttatcaaaggttatactgtttaaagaatttttaaaagggaaagaattgatttatgctacaaaagaagattgtaaaaattttgtagactatatacagactaaatatgcgaaatcaacttgtgaaaagatatatagttatttacatagtttttataacttcttaaaaaaagaaggatacatagatataaatccatttagatatgtagaaaaacccacagtaacaagaataaaaacaaaagatgatgttctaagtatacaagaaataaataaacttataggtatcctaccaaaattaaatataagagatagagtaataatagtctgtctagttactactgggtgtttattaaatgaattagttagcttaaagtggaaagaccttatggtagatgaaaacgataactcatatgtaaggttaggtaagggaagaaaagaaagagtagttaaattacatccatacttttttaaacttttagaagattacaggaattattctgggcttccagaggtaataatacctagtgatgattttatttttacaactcaaaagagtaattctataacagatagaaatgtcagacttatagtcaaaaaagcattagatttagctggactttctcaatattcagcaagagattttagacattcatttgcagcaataagtttaaggcttggggcagatgaaagtgatgtaaaaaatcagcttggatggagtgataaatactatgcaattagatataagtatgtattaaattttgttgatagtgaaatagtggattacttaattgaaaaagataatttggatataaataaaaaatagtaataaataaaaaatactatatatagatgtgaacaaaaaataaaaaagtcttgttatagttcgtaaaattatatataattatttatgtactaatgtgtacacagtaatcacacgacaaaagatttaaggaaggtgctaatataatgatagataataaatatactacttactcaaacccacttacagacagatattgtagcaaggacatgagttatatattttctccacaatttaaattctctacatggagaaggttatgggttgcacttgcagaaggtgaacatgagttaggaatcaatataactgaagaacaattagatgagctaagagctaatatagataatataaattttgatgaagctagaaaaatagaaaaagaagtaagacatgatgtaatgtctcacgtaaaagcttatggtttacaatgtgaaaaagccaaaggaataatacatttaggagcaacatctgcatatgttggagataatacagatgttatacaaatgaatgaagctttaaaacttctaagagtaaagcttgtaaatttaataaacaatttaaaagaatttgcacttaagtacaaagatatgccagctcttggatttacacacttccaagctgctcaacttacaacagtaggaaaaagagcttgtttatgggctcaagatttaattcttgatttggaagatttaaactatagaatagataacatgaagttaagaggagttaaaggtactactggtactcaagcaagttttttaagcttatttgaaggagaccacgaaaaagtaaaagagttagataagaaaatttgtaaaaagatgggataccattcttcctatgcagtaagtggacagacatatactagaaagttagattatcaagtaataagcatactatcagggatagctcaaagtatgcataagatgactaacgatataagacttttacaaagtttaaaagaattagaagagccatttgaaaaaaatcaaataggttcatcagcaatggcttataagagaaacccaatgagaagtgagagaatagcatctttatctaagtatataatctctgaatctataagccctgcaatggtacaagccactcaatggttagagagaacattagatgactcagccaataagagattggcaatacctcaagcatttatggcagcagatgctatacttgaaatagggataaatgtaactgatggtttagtagtatatgaaaatatgataaataaacgtgtaaatgaagaacttccttttatggctacagaaacaatacttatggaagctgtaaaaagaggtggagatagacaggaattacatgaaataataagagaatattctatgaaagctgcctatagagtaaagcacgaaggtaaggataataacttaattgaacttataatgaatgatgattcatttaaaatgagcaaggaagaaatactatctataatggacccaaaaaactttataggtagagctccagaacaagttgtagaatttgtaaatgaagttgtagaacctgctataaaagattataaggaagacttaggaaaagtagatgtggacctaagagtatagaattgtacagataaaatataattaaaaacggctatcttatttataaataagatagccattttaatgggctagcgtcttctcttcagcgctgtgaagagttcttctttacttactataccatgaatttaataaaatagctatataaataatatttaatagaaataatataaataaaaataaaaaaatgataagattactaattaaatttaaacattcagcaaaaactattgtacttgcaatatttttaatgtaaactgaaataaagttatttagataatttaataaattttaaaacaaccgaggtgattatatgaactatatagtaaaagataccataagttttttagtaaaaacatttcctaagatttattctagtctgtacttagaagacctaaaaaaatttgcaccagattataatgtaaataaaacacaattaagagcattagttttcataaaaaattatggagtaataagtatgactgatttatgctctaagttaaatatagaaaaaggcagtttaactagtatggttgatgatttaactgataagaagtatgtaacaaggaaaagagatttagttgatagaagaaaatatctaattgacattactgaagagggagataagatagcaactgattttatggataaattaagtgatggtttaggagaaaaactttctaaattaactgaagaagacagaaaaaaatatttagaagcaataaatactcttcaatatatattaaacaaagaagaatttagatagaaaaaatataaaaaatttttatatttaatagtactaagattaattctttgttattcatttaactatataattataagtctaaatacaatctaaaaagtacatcttaaattttcttgatgtacttttttataatttcttatacattttcttatttgttagtacctactcatacctctttgtgtaatttatatttttccattttatattcaataattttattttctaatctctttttaaatttctatatatcacaatgttactatgtctttgtttgaaaaaatttacagttttgaaaaaattactatttatgtaaaaatattttaaaacaaattataaagtttcaaaaacaaaataaaaatatataattatgacatagaaaacgttttaaaaatttaaaaatggagggatagaaatgaaacaaaaaatgaaagagttttttttacagttaggaaaatcatttttattgccaatagcattaatatctgctgcaggtatatttttaggaataagttcagcattttcaaatcctaatatagttagtgatataccttttttagaaaataattttattcaaggaatattgggttttacaaaagctataacaggagtactttttggaaacttagcaatattctttgctatatcaatatctgttggtcttgctaaagaagaaaaagcagtttctgcattttctggttttgttggttatttagtattacacactagtgtaaattatatgttagggtgtagaggtattcttgctgaacctgacatgatgagagaaatgggtcaagctgtaactttaggcatacaaacattagagttaggagtatttggtggaattgtagttggtataataacagcatcattacataataaatactataatataaaactgccagattatttagggttctttggtggaactaggtttgttccaataataacaacagtagtattctctattttggggataataataccatatatatggccatatgtaaatacaattattcagagtgtaggtattggtatagctagtttaggatatttaggaacctttgtatttggatttcttgaaaggcttttaataccatttggattacatcatatattaaatgctatgtttagatttactgaagtaggaggttctttagttgtaggaggacaagaagtatttggagcattgaacatatttttagctcaactaagtgaccctgaaacaatcagtttttcaacagaagcaactagatttttagctcaagggaaaatacctataatggtatttggtcttcctgctgcagcatatgccatgtataaaactgcaaagcctgaaaataggtcgaaggttaaaggtatattactagctggtgctttagcaacatttgtaacaggaattacggaaccattggaattttcattcttatttgtatcaccaatattatttgttatacatgcatttttatcaggtatatcatttatgatgatgcatatatttggagtagcaataggaaatactcaaggtggcataatagatttagtagtatttggagttatgcaaccaaatacaaagtggatttattctataatacttggtttagtgtatgcactggtttattataatgtatttaaggttttgatacttagatttaacttacaaactccaggacgagaagaaataacagatataaattttgatttagaacctttatcaaataaagtagaaatagctcaaagtggagaaactactaagagagcattatccataattaaatatttaggtggtaaggagaatatagaagatataacaaactgtataactcgcttaagagtagtagttaaagatatgagtaaagtagatgaaaatgcttttaaaaaatatacaggtgcaatgggcgttataaaagtatctgataaagatatccaaataatttatgggccatctgtatctcaagtaagagacgaagtttcttttgcaatgtctatttaatgtctatctaatgtaaatattaaaaggcaatactaatttataatttgtattgtcttttttgtagtataataaacataagataaatgttgtatagtgtatatttatataataaatatgagaaagttgtttaactacaaatcattattatggaggtataaatgaacctaatagacaaattagatataaatcaaaaaaaattatctacaaatgaaatatctcttttaaactattttctaaaaaattctgaaaaaataaatcaaaaaaagattaaagatatagcaaatgaaacttttaattcgactgcatacatagtaaggttttgtcagaagctcggcttttctggatatagtgaatttaaaaactttttagttttttcatattcaaatagaaatgaaagaaataaggagtttactaaaagtcaaagtgatatttttactgatgttatggatacacaaaatttaataaatgtagagaatatagatatgtgtttaaatgaaatacataattctaagcatatatatttttttggtgttgggtcttctagattagtatgtactgaaatgtctcaacgtttttcagctataggtgtaaatgtaaaatactatgatgattcaactctcatgtatttggctgcatcaaatattactaaagatgaccttgtaattgctgtatctatgtctggagagactgctcaagttattaaggcatgtaatatagcaaaaacaaatcaagttaaagtaatttctctgacaaatataagtgtcaattcattatcaaatatagctgatataaaattatttgtatcttctccacaatataattttaatagtgttaactatacgtctagagtgccagcactttctcttatggaatatatgtttcataaatacattgaaaaatacaatagatgaaaaaaattacaattttgaaaaaaatactaaaattgaactatttttaatgattacctaaaagtattcatgtagaaaactttatatattataatcatcttacaagttagttaataaaaaacaggggtgattaatatgacaatgaaaaaaagatacaatatagctatagttggaggaggcagtacttggactccaggacttttaaagtctttatgtaaaatgagtgatagatttcctctaaataaagtaactatgttagatgtagtagaagaacgtcaaagattaataggggaatttggaaaaatattatttaaagaagaatatcctaaagcaacacttgaatatactacaaacccagatgaagcatttatagatgtagattttgtatttgttcaaatgagaactggtggtcttaagatgcgagaattagatgaaaagattcctctacaatttggactggttggtcaagaaacttgtggagctggtggatttgcttatgggttaaggtctataggtgatatgatagaaatggttaagactgtaagaaaatactctcctaaagcatggatattaaattatacaaatcctgctgctattgttgcagaagcattaaaaagagtatttccagatgataaaagattacttaatatgtgtgaccaaccagttaacttgttaaggtcttatggaagattgttagacatggattcaagaacatttgagcctgtatactttggattaaatcactttggatggtttacacatttgtatgataaaaatggtgaagatttggtacctaagataaaagatttagtagcaaactctggattccaacctgttgatgcagaacaaagagataaatcttggttagacacttatggaatggttaaagatatgttggaagatgtaccagattacttacctaatacatatgtacagtattatctatatcctgataaaaaagtagctaaatcaaatataaattgtactagagcaagagaagttatgaatggaagagaaaagcgtgtatttgaagaatgtaaatctgttatagaaaaaggaacatctataggttctaatttagtgcataatgatgctcatggggaatttatagttgaagttgcagaagcaatagctcataacaaacaccaaatagccatagttataacagaaaataatggggctattaacaacttacctgatgatgcaatggtagaagtagctgcgattcttacaaagaatggaccgagacctttacatgtaggtaatataccaacattttataagggactgttagaaggtcaactagcttatgaaaagttagcagttgatgcatactttgaacaatcttatgaaaaagctattttatctttaacattaaatagaactataatctctccaactaaggcaagacaagttttagatgctttaattaaagtgaataaagattactggccaacactatataaagaaaatgaaaaatagtcaggtctaagtcttaattaatatattaattaagaaatgtccccttttcaaataatatctgaaaaggggacattttatatcattaaatttatataaattaagtttaaaaaattatttttgtaaagctacatattgctctaaaccttcttttaataatgtagcagctctatgaaggtctttttcatttaagatgtaagctaatcttatttcatcacgtcctaaacctggagtagcatagaatccttcagcagggcaaaccataactgtttcattatctttgttaaattcttttaacatccaaattgtgaaatcttctgcattttcaactggtaatttagcaactatatagaaagcaccagttggttttttacatataacaccttcaaccttcattaattcattgtataatacatctcttctttttttgtactcttcattaacttctttgaagtaagaaacaggagttttgtataactcaacagctcctatttgctctaatgtaggaacacaaagtcttccttgacataatttaagtatttgagcgataagacctttatttttgcaagcgatagaaccaattctagcaccacaagcactgtatctcttagaaacactgtctattattataactctatcctgtacaccctctaagttaccacagcttgtatactcaagcccatcataaacaaattctctataaacttcgtctgctattatccataaatctttttctttagctatttcagctaggatattaagttcttcttttgtataaattgcaccagttggatttcctgggttagaaagaattatagccttagttttatcatctactttagacaatatttcttctttagatggaaggtggaaaccgttttctgcctttgttgtaacagcattaacttctacatttacagattgaccaaatccattgtagtttgtatagaatggttctggaactaatagattatctcctgggtcacaaactgccatcatagtgaaaagtaaagcttcactaccaccattagttactaataattcatctttttcaaaattcatatcgtaagttttatagtaattttgaagtgcttctaataattctggaataccttctgatgtagcatattctaagacttcgctatcaaagtttttaacagcatcaaaaaatcctttaggagtttttatgtctggttgtcctatgtttaagtgatatactttgattcctttatcttttgctgcttgtgcaaatggaacaagttttctgattggagaggcttgcattgcactaactctgtttgaataattcattttaataccccctatttaatttaaatacgtatattgtattatgtaaattgtatgtttgaatacaagacatctttacaagataataataacatacttatgggtaaaaatcatcaaaaaaaattaatatagctttaaaataaacttttaacaaattatagtaaaatacccatgtttatgccactaaattatgtattcataaattaatttatagtaagataatattctgatacactgatagtgattttttagttataatctttcagctatagacaaaatatataataataaatatgcaaaattataaaaaatattataaatttatttaacagatacgataaatatcatataattatattaaaggctattaactaagaggtgttaattatgaaagaattaagaatagatccaattactaatgatgttgttatatttgctacagataggttaaaaagacctttagatacagcagatatcccaaatgaagatgaagaaactaatgaatatgatgaagaatgcccattttgcaaaggaaatgaagctcatgcaactgatgcattatttgaaatagaaagtgaagaaggatggcttgtaaaatctgtctacaataaatttcctataattgatgatatggcaagagatgtatatggtgttcatgaagtaatgatagagagcgataaacataatcgtagtttttataacatgagtcaaaaagaatttgaagatgttttttttatgtatagaaatagatttagagatttgtcgaaagatgataaagtagagtatgttagtatcttcaaaaacttcttgagaaaggcaggagcatctttgatgcatccacatgctcaaatattgtctatgtcttttattccacctgaaattacgaatgaactgttagtttcaaaggagtattatgacagcaataaaagctctttgtatgatgatttaatagaaaatgaaataagtttagatagaagagttgtttataatggagaagcttttttggtacttataccatatgcaaccaagtatagtggagaagtaagaataatatttaaagataaaatagagtttggtgagttaaatgataataatatacaggagctttctacaatatttgaaaagttgtttaagaagttatacaatatcaatggatatatgccatttaacttatgtattcacactcatccaacaaagattgaaacaaaatcgtattttaatgttcatatgcacataatcccaagaaaatataattttggaggatttgaacttggaacaaatatgtatgtttcttcaatgagccctgaagatttaacaaaaaagttaaaaattgattaaaacatatatttttaggtattaagtaaatagtaattatagatgaaattatagtatagtattgttaaaataaaagtaaattaagaatttacaataaaattgttgaaaagcccccatctttagctatggggagtgtgtcaatgtttagatgaggagtataagtatgaaatttatatcatggaatgttaatggaataagagcttgtgttgggaaaggatttttagactttttcaaagaagtagatgcagatatattttgtttacaagaaactaaattgcaagaagggcaaatagagttagatttaccaggatattttcaatattggaattatgctgagagaaagggttattcaggtactgctatatttacaaaaaaagagcctttaaaagtaatgtatggaataaatatagaagaacatgacaaagagggtagagtgataactctagagtttgaagatttttactttgttacagtatatacgccaaattctcaatctgaattaaagagactagaatatagaactagatgggaagacgactttatagattatttaaccaaactagataatcataagcctgtaattgtgtgtggagatatgaacgttgcacataaagaaatagatttaaaaaatcctaaaaataatatgaaaaatgcaggttttactaaagaagaaagagagaagttttctaaattattagacagtgggtttatagacacatatagatattttaatcctgataaagaaggcgtttatagttggtggtcatatagatttaatgcaagaaaaaataatgcagggtggagaatagattatttttgtgcatccaaaaaattagaagatagattagtaagtgcggatatacacactgaaatattaggttcagaccattgtccagttgaattagagataaaataaaaattaattacgataaaaattgggctgtagatataaatttaaagttaactagttttttaatctacatgcctattttttatctaaataaactctatttgttttttctttgcttaacattttctaatgtaaattgatttgttttccccatattataagctaagttaatgatttttttctcgtctttagttaattcacgatttaaaattttcctaaattcatcaaataacttatcataatcaactctttttttattagaatatcttatagttttaggttttatactcgtataaagatatatatctgggactatacttggattgtatatcttaataaaaactttagcagtataatatgcatcatttaaagcattgtgataagacattttttcatcaagttccaatatagaaatagcattttgtaggccaatgctttttcctgctggattattgaaatatttagatgcatgttgttgtatattaatataagatttaggtaaggaacttgatggtagcttgtgatagttgatattcctgtataattcctttaaatctccaactccccaaacacataatatagggtcttgtgatgatataaattttataaaattgttgtagacctcagggaaagtaggcgaatcattaaaatcagaatttttaatattagtcatacgactaataaagggatgtatgtctttataaattgtaggttttacatagctattaaacgtatctattatattgaatttagaatccaatttaattgctcctatttgtataatttcaaaaggacacttttcattggatacagttttattgagttttttatcaaatccttggttaaattccaaatcgaaaattatgtattccataaagtttatctcctaaatttttttattatttcttttactatagattatattataaataaaattaaattttcaaataaaaatacttttattttagtataccccatatttgtaaaaatgttaaactattgtatgtataatattttttccaataaaaaatattgcgaactttttatacttgatatataataatataaataaaaacacgaataaaacacgaataatttgcaagaaaaattcatgaatgtaaggaaaatgaaatttatcttgtatttaacaaaataaaatatacataaaaattatgggagagtggaaaaatggatagtctattatacgtaatagagaaagataaacacactaatgaagaattaagagaaatcctaaaaagcaataaaaatataagatttgtttccttaatgggggttgatttaggaggaaatgcaacagatgaaaagattcctgtagaattatttttggaggatatagataaatttttggaatcagctatacagactgatggttcaagtgttgagctttataatatagctacattaaataatgcgaaagtagatttaatgccagataaaagttgtcattggtatgtagattacaatatggaatatatagacgaagaagtaggtctacctgttggaacattaaagatacctgcatttttaatacatgataataaaaaagtatgttctagaggagtacttcaaaaagcagataagtactttaaaaagtcaatgtatgaaatatttagagaatatccacatgtaataaataacataggaatagattcagtagatgatatagaggaaataatgttaacagcagctacagaacttgagttctgggttaatactcctgaggataaagctgacttagagaaattatatgtatcacaaagcctaaaagagcaatactggaaaagaactcatggtattataagaacttgtttagagaaaagtttaattatacttcaaaagctaggtgtaaaccctgaaatggctcacaaagaggtcggaggaatacaaagttctattagtatagatggaagaacaaaccatgctatggagcaattagaggtttcttggaagttttctacaccattacaagcagcagacaatgaattattagtaagagatgttatagaggatgtatttacatcacatggactagaagttacatttaaagcaaagccaattcatggagtagcaggaagtggtggacatacacatgtaggagtaagtgcgaagttaaaggatggaagtataaaaaatctatttgctccaaaagatttaaaagaagattatctaagtgaactaggatatggggctcttatgggacttctttacaattatgaagtattaaacccaattgtaacagcttctaatgatggatttaatagattagttcctggatttgaagctcctgtatgcatagttacatctttagggcatagttatgagattccatcaagaaataggtcagtgcttgttggattaataagagatatgaaaaatccaaagactgtaagatttgagttaaggtcaccaagccctctatctaacacgtatttagtaatagcaggatgttatcaaacaatgttggatggtataaaagcagcagctaagagtggtcttagtacaaaagaacttgaaaaagagttatctaaaaatgtaggtgaagaaagtttctatttagaaaaagatagagcatatagagatgaaaatgatgtatttgaacattatagtttggaagaaagaaatgcaagatttggaataccaccggctacagtttatgaaaatatgaaaaacttagaaatatatgcttcaaaattaaaatctttaaaacaaggtgatgtatttactgatagtataatagaatcatttaagattggagctatagataagtggcaaaaaaaattaaaaactagaataatagaggctgggattcaaaaaataagaagtattgtcaagatacacacaaaagaaaatatggatgcgcttgatgaggtagtttggaactcaatatcggatttaaagttcaatattatgaaggatactttaactagagaatcactattcactagagtgagagaagctatagaaaataaggattaccagactgcttcagatttacaaatagaattaaagagaagtatggaagaaatacaacaactgtatatgcagtacaagaaaaatatatactaatataacaatttgattttgatatgataaaggcaatcaagtattattaaacactatgagtaaattctcaagtgtaaaagcatacttgattgcctttaattttatgtttgaaattttttaatagtacaatttaactgtaatgattatctattaattctgatatataatcagcaattttctctggatgaataactgttttaaattcttctaaattttttttcataaagtttattatagaatcaaattcatttgatactaatttataaaatatgtttttaaggtctaggtcatcactataaatcatgccaagacccttatctattataaatttagcgttttcaatttcttgtccaacttttggcattttcacgagtactggagtttgtgattgaatagcttcaaatatagttgctcctccaggcttagttagcattaggtcacattctcttattagattatacatgtcgtttacaaatccaagtactttaatattttttagaggttttttatgagttagattgtcatataattttttgtttttaccagtaactattgtaatttctatagaattactatgttcttcaataaattcatctatccaatgcataaaatcctcatctatatcaaataggcctcttcctccacctagaagtaatagtctatatttatcacaacatagttctttactttcaatttgaaatctcttatcaacaggaactccagtaacctttatggagtctggatttattcctttctgaaaaaatctattttttatttcaggagaaggaacaaaatacaaatctgtattttcaaaaacccattccatactatctacaacatctgttataactgtaagtgtaggtatatttatatcaggattttttatcttaaagttatttacacaagcagccgctagtggaaatgtagagataatcaaatctggatttatatcagcaatatactcagaaagtttaggtgtatataatttatgagataaatcatgtcttgaatcaaacgatttcttaaagtaataatagtaattatataatccaggagtatattttgtattgttttcataaagttttaccataggtttattcatcatgggaatacttgcatttataaagttttgtataacaacattatagttactatatttttcaataatacattctttgactgcttttgcagcacttatatgtccagcaccaaattgagcagttaagattaatattgttttatcatctttcattttagccaatttatcaccactttcataaaatatatctgattagagtattatacatttatagaaggatttaatcaacaagaatatttaaaaataactattgtgcagaacatagtactgtgttattatgaggatataagaagttttaacatagtaccttgtaaaacacaatactgtgtatttaaagaaaggatggagtatatgaacacacaatttagaaagggtgttttagaaatttgtgtacttgctctcatatctaagaaagatatgtatggatatgagatagtacataacatctctaaagtaatagatgtaaatgaaggaacaatatatcctattctaagaagacttacaaaagatttgtatttcgaaacatatatactagaatctaatgaaggtcctgctagaaaatactatagaataacttcactaggaaaagagaatttatccaatctgatggaagagtggagagaatttgtaaaggctgttgagattttaataagtgaagatgagggaggtaatgaacttgaataaaactgagtttcttgaaattttaaaggattatctaaaaaaagatttttctgagagcgaagttaatgatatattgagagattatgaagagtatttcgtagatggtcttatagagggaaagagtgatatggagataatagcatcacttggttcaccaaaatctatagccaaagaacttatcttgcagactaaagaaaaaaatattgaagaggaaaaaataataaatacagatgttttgaatgataagtttagtaaatttaaatcagatatgaaaaaaggttactctatcttaaaagatgaagcaaaagaaaagtatagtaaatcaaaagaaaatatagatggaaaaataatgaatacagatatattaaatggtaaatttagtaggtttaaatcaaatataaaaaaggattactctatcttgaaagatgaagctaaggaaaagtacaataaatcaaaagaaaatataaatgataaacttacaccaagtatagaagaaggtgtagggggattatctagacaagttataaagggattattagtagtgttatctttatttctaattgttccagcatttgcgtttgtatgtgctattgtatctgttactattgcattagtatgttcattaattgcttttgttatattaattccatttgtgattaaatttatagcaatggttccagatgttatgatgttttgtattttcgcaaccatagcatttgtagggcttgagatacttgcatggcaaattttattatttgctataaaactaggtaaacaattactaaataattatatacattggataaagagaaaaaatatttatataaaggcaaatgaaaagatggaaaaaagaaaaaaagctactttaaatgatgaagatttgaataaagacattaatgaagattcatataataatgattactacaatagagaagaagaaagcataaaagaaactgatgaatataatgatgatagtataaattttgaggcgatatataaggaccttgaagatatagaaaataagaaaggagaagataaacatgaataaaaaacttgctatatttgctgcagttttattggtaataggtataatagggacaacatggtcagggattttagttatgccaagcctaataaactttggtttagaaaaggaagctgaatttaaaaaagaaaataaactttatcaagaaaaagtaaatattgacaagttagatatatctgttgacaatataaacgttacaataaagaaaagttcaagtgaagatgtgcgtgtaacaacaagaggaaataatgagttttacaaatacaatgtaactttaaaagataagactttagttgtaaaaggtgaaagaaaatatgaaaataaaattaaaaagattaaaaatttcgaccaattattaaatacatctataaatagtatgttttcacatgattatagagaaattataatatatgtaccaaataatgtagacataaatgcatcaagtacaagttcatacttatttgtatatgataatgtagcttcaaatactataacatataaaacttcttatggaggttttagtagagctataacagagaacaaagtaaatagattagaaaacctaaacttaatatctaatagcaatcttcacttgtcaacaaaatcaattttaggcgttaaaaatgtaaacatagaatcagagtcattggatatatcttcagagaatgaagatgtatttatcaataatatagaagagtatatacctgaaaatgtaaatataaaagagaaaataggtagaaattcaaattatgaaagtgaattttacttgtactctaatatgccaattgctaagttcctggacatagaagttccaaattctaaggtaagacttgatataccagtaaataagtataaatttaattgtgatataaagtcaaaagaagcaattgaagaatttaataatgatgaagaatatgacaatgattcatatgattatgaacatagtgaagaacatagcaacaagtatagaaatacgagggaaataaaagggcttttgaataaaaatctgtcgaatttagagaaagaatatactataaaaataaattcaaatagcttagaattgtaaataatttactataataatttataaattgatttaaaagtataaaaatataatctatactatggtataataagtatcgaaagagaattaggagagggatacttatgaataaaatagcagtaagttttttaataattgctactactttattgagtacagcatgtatggattatagcatcagtgcagttgagctagttgattctaaagaatcagcagttgtaaagaaggatgaagatgcaaaagaagaaacaactagtaaaatgattaattctaaaaaaactactaaaatacctatagagataatttcaaaggatgagaaaatagtaaagtacttacagattgatgaagaaagttcacttaaggataaactgcgattaatcttagatacattatcaaatgagtattttaatggtttagacatggaagtagaagttaaggaaaaagataatcttgttaaaataaacttgatagaaccagataaaaaaagtagagtttcttggaaagatgattatttgaatgaacaaaatataatatatactataaataatattattaaaaatgtcatccaagaagaagataatagcatttggattgaagaagtagagatatactacaatggaaaattaatagaattaagataaaaaaagatgtgtttttaacacatcttttttttgttttttaattcttataaaatccttatatttatgatttagaatgattcttgtaaataagtttgacaaaagaaaggatgaaaattatgaataattatattttgcaggtaaaaggagtttctaaaaaatttaaggagcagatggcagttgataatatttcactagcaattaaatctaattctatatatggattattaggaccaaatggagctgggaaatctactttattaaaaatgataactgggattttaaatccaacttcaggaaaaataatgtttgagggacatagatggactagaaaggatttatcaaatattggttctcttattgagtctcctgctatatatgagaatttaacagcacgagaaaatttaaaagtccatactactttacttggtcttcctgactctcgaattgaagaagttttagagactgtcgacttaagagatacttttaaaaagcgttcaggtcaattctctctaggtatgaagcaacgtcttggtattgctattgcattattaaatcacccaaaacttttaatcttagacgagcctacaaatggtcttgaccctattggtattgaagaacttagaaaattgattcgttcttttccaaaacaaggaattacagttattttatcaagccatatcttgtctgaagttgaacaagtcgtagatgaaatcggaataatttctaatggagtaattggttatcaaggagaagtatcaaaagaacaaaacttagaaaaactttttatgaaagttgtagctgaaaatagaaagagaggggagtaatatggaaagatttattagagtggaatttcaaaagatgaaaggaacttttggaatgaagttgatatggatagttccagtgttttgtatacttttgtgtggactaggtggagggcaaaatgctgctttcaactggtggtatacgacatttcttccaggagcattaacattaatatcttctttaatagtattaaaagatgaaaaaagtaaatatcgtggtattttaccattgccaattgaaatgaaagacgtttgggctggaaaaatgatttactgtattatttgttgttctatagcatcgattatttctgcaataggtgtagtttttgttgggataatctataaagaaactatttcaataggtcaaaatatcattgcaactatattaattattttactatttatgtggcagattcctctttgtatgtttttagcttcaaaatttggtatatttgttacagttctaacaaatatgttctttactattgttggagttgctgttttctcaactacagaaatgtggtatgtatttccatattcgattccttcaagattaatggttgttgtattgcatattctaccaaatgggcttcctgtaccagaggggagtgaacttttaaataatgctgttattttaccaggagtattaatatctgttattttatttgtattatttgctttagttacaagagcttggttcaataatagagaggtgaagtaatatgagacaactaataagaatattttgttctgatttaataaaattaaagagaaattttataatactaatgcacatttgcattgctttaatggggatgggattgtttttatggtattataaggtttcaggagctgataatatattaaagatagtagcatatttacaagttatagcaatagcttttcctttattgtcaggtgttgtgtgttcaatgtttgttgaacaagaatattatgcagggaattataaacatatgttaacaacatctaatccaaaatatcttactcttataagtaaatatataatcttagtatgtcttggttttgtagcaacattagtgtctgtattaggttttaaatttggtatatctaaggcttactttacatcaagcttttatatgatttcaattctaattttaattgggtgtaatttatttgaatacatattacatttattcttaagtttaaggttcggaaaaggaacatcaattggagtaggtatagttgaaatgttactttcagcattattattaactggattgggttctggcatttggcagtattttccttgtgcatggggtgttagatttataactatttggtcgtctttttcaagttctaaaacggttgaatatataaaggttgaatcaataaaagcatatcaatcaacaggtttaatgtgtggttttgtaacaattttagcatttgtaattttatgtatttggttttctaaatgggaaggtaaaaagtcagaagaataaataaaaattgactgtttatttacattatatttatattattatgttaaaatataacttagcaatgaaaaatataaaataatcaaataaaaactggttaggtattaattatgaattaattaaaatatttggaggatatggcacaaatgcttagaagtaaaaaatctaacaacaaaaaagttgaaaagttaagaactatttttataaaatatttatctttattctttgttatgacaatttcatttgcacttcttttaatgttatcattttctgtattattatcatcaggtgtaatattaccagctaattattcagaaaaacaatttgataaatataaagaaaagattatttcaagtgaaaaagcaattgaagatataattccaaatttatacgagtatggtgtttatactttagatgggaatttgatctcaggcacttttaataaaaaagaatcaaaacaagtatggaatttaatgagagatattgaagaaaggcatgcatattcagaaagttatataaagttttttaagaaagatgaagtttttataataaaatacaaactagtatcagagtatagttctccagttttaagagcatatttaccaaaaccagagatgttaggtatgattatttttagtataatattttttattgaaattgttatattatcaaaagtatttggcaagaaatttaatattgaaatggagcttttaaaaaatactacagaaaaaatagaacaacaggatttagattttgttgtagaatctagtaaaatttatgaaattaacaatatccttttttctatggataaaatgaagttggcgttaaagaattctttagaaaaacaatggatgctagaagaaaatagaaaggaacagatatctgcactggcacatgatataaaaacaccattaacaattatacatggaaatactgacttattaattgaaataaatgaaaatcctgagttattagaatacatggaatatatctcaaagggtgtcactcaaatagaaaaatatattaatactttaatagatatatcaaaaacagagaatggctatatattaaataaagaagcaattaatatgagtgagtttataaaagatgtcttactgcaaatagaagcattagctagtactaaaaacttagatgtggagttttataaacaagataatttgcctaaaaatataactatagatagagaactgttattcagagctattatgaatataatttcaaatgctatagattattcaccaagccagagtaaactatacataagtgtatcagtaagtaataaatacttaaaatttgtagttacagattgtggaagtggtttttctaaagcagatttgtcaaaagctacagaacagttttatacaggagatttgagtagaaattctaaatctcattacggaatgggactttatattgtaaataatattgtacaaaaacataatggaattttatatattgaaaattctgtgaaaactggtggtgctatggtaacaattgaaataccaatagtttagtaaataatatccattttgtaaatacctaaattttatgatttataggtatttataaaatggatagtttttttgattttatatattagttaaatctgataaaaagttttcaaacataactccatcatttctatcagtatcaaattgagatgtgtaatttatagttttatatataaaatctgttgcagtattaaccgctactcccaaatcatgtttatttactaacataccacaaagtatagatgtgaatatatctccagttccactgtaagaacaattattgtatttgactgatgtaaagaatacatggtcattatctctatcataagccaaatttaatatattatcatcttctaatataccagtaataacgactttgctaggtcccaaatcagatacagattttgcaatatatataagctcatctctattataatcgcttttagtataatcatttccagttaagaaacaagcttctgttaaattaggagtagttaaatctgaatgtttaactaattctttaatttcctgtctcatttcttctgtgaatattggatacataactccattatcacccatcacagggtcaactacgataaaagcattgggataatcatttataaaattagccactatctcaatttgatgctttgaacccaaaaaaccactatatatactatcaaaattgacttttaaatttttccaaacatttgaatattttaccatttcatcagtaaagtctaagaaagtaaattcaggataaccagtttgacttgaaagtatggccgttggaaatggacaacattgaacctttaatgctgaaagtataggtatagcaaccgataatgagcattttcctattccagataagtcattaattgctgcgacttttttttgcataaaaaaccctccattagtatgtattaattataatgataccaaaatatttatatacatatatattactataaaaaaaagaaaaaagtagattataaaataaaaaattgtaaaaaaaacagtgtattgatacaattaatttttaatattggacataataaaatagagaattattaaatatgaaaattattgtatatgacagaatcttctttgtaatttcatttataaggtgtactatttgggaggtgtagctttgaaaatactgaaaaataagaataagtacatcaaaggtataatggcatttgtatttttgtctttagctactacagcaggtgtatttttaatcaatgatttaagtatgaaaaatatggaagaaaaagtcatggaatctgcaaatgttgaaggtgatgatgtaaaagaccaatataaactattgcttgaaaacttatttgactacagaaataaggcaatattagagaaaaatgaaaacattttaaaaggtctttatgagacggataaaaaatttggtctgtgggcttatgaaaatgaagtaaaaaagatgaagtatttagaaaactggtctagtaagcaaggtgtaaaatttaaagacataaagacaagggttaagattaaaaaaataaaagaaaaagaaaaagacctctatggtataatctgttcagtatcgactgaatataagtattcatatgaaaatcaaaaggacaaagaaaatgcctttagaataggtacatatcattatctaaatgtaaaaattatagataatcaatatgtcataactaaagagtggtacacagacccttttgcagactctttaaatttagaaaatataaaatctgaggatataagaaactatattgggcaacaagatggtgtagagttacagcttacagatgaacaaaaaaaggctatagattatgcacataaatactgtggagccgcagctgatgaagaacatggtatgaaatttaatccaaactatagggattataatccagaaggtggagattgtgcaaactttgcatcacagataatgtttgaaagtggaaggttcaaaaagaactcaatttggaattatagcgagagagcaggtacaaaagcatgggtaaatgcacaagcttttaaaaattatgcactgtatagtggaagaggttcattaattgctaaaggttcctatgaagaagtatacaaagaagcttataatttacgtccgggggattttgttggttatgagaagaaaggcagaataacacatgtttcgacagtgacaggattagactcaagaggatatcctttggtaacttgccataatactgatagaatgttggtgccatgggatttaggctggagtgataagtccataagattccatataataaaaataaattattaaaaaattataaagaaaaataaagtgtaaaagataataatcatttaaaattataaagtaaaaaaattgattattaatgtataaaaataataataattgacaaacatagctatatatgatagagtagtaataaggttacagaaaagagtagctaaatatttgtgtttttttaggaggatttattaatgaaaactggtgtagttaaatggtttaacaacgaaaaaggatttggattcatatctgtagaaggtgaaggagatgttttcgtacatttctcagctataactggagatggatacaaaacattagaagaaggacaaagcgttgagttcgaagtagtagatggagctaaaggtcctcaagctgctaacgtagttagattataattaaaaattcatatatattagtgttctagtaatatgagagataagccgctaatcatttagcggttttttcagtttttgtaaataaaattaatagcaaaataaattaaaattattaaaataaaatcattaataatgagataaatatgttaaaattaatagtgtagagtaaaattattatggctaagtttaagtcaattaatttttagtaaattttctaaaaagagaataagtgatactgatagaccatataaaaatattaataaagcataataagattaaaatgagcaaaggaaaaacgcttgttacagcgtatagtattaagaatacttagaaaataagaaaggagaaagttactgcaaaaaagtaacattataaatattgagtaatatttataagttttcagtaacggtgggtagtgtaatgaacatattattctttctaacaccaaaaagtgaagtagcatatatatatgaagactacactataaggcaagcactagaaaaaatggaatatcacaaatactctgcaattccaataataagtaaggatggtaaatatgttggaactataacagaaggtgattttttatggacattaaaaaacgatttaaatctggacttaaagggattggaagatgttccagtgacagatataaatagaaaaatggataattctcctgtttccatcaacgcagatattgaagatttagttataaaatctttaaatcaaaatttcattcctgttatagatgaccaagacacatttattgggataataaaaagaagagatgtaataggttactgttatgagataatacgtggatataaaaatttagctaatgataattaaaaatcttatttaaacttttaagctgagttctttacaataaaagaatgataatatgaaactgaatatttaaactttaatataaaaagctgtcttttctaataaatattgtgaaaagacagcttttttatatatgaccttatgattaatcgttgtattttacaaggtttccgtacttagcattaagagcatttatcttatttccataaacttcattttgtttttgatataataaacttttttcaacttcagccttaacttcatcaaatgtagactctgtactttcttgaaggtcttctaattttattatatggtatccaaattgagttttaactggttcacttacttcacctttagccatagagaacacagcttcttcaaattcaggaaccatttgtcctctaccgaatgttcctaaatcaccacccatatctttagatgggcaagaagaatgtttaagagctgcatcttcaaaagatatttcttctgattttatttgagcaagtatttctttagctttttcatcactatctactaatatatgtttagcagttgcactttctggtttagagaaagagctcttattagcttcaaagaattttactttttcatcttctgttacattaacactagataaaactttatttatagcaaattgctttaatacattttcttctatctttttcatttctaatttaaatatttcttcttcatctaatttttcttctttagcatctaagaagaataattcttgattcactaaatcatttaataagtgtttttttccttcttcagttttaaattgcatagcttgataagggtctaatgattttaatgcattttcaatatcaatattagttatctctttttctccaactgttgctaaaacttttttttccataatagttaactccttcatagtgtatttcattattaatataagactaccatcttaaataatatcagaaaataatgtagatgtctaatatttaaagccatattaagtcaaatagaattaaatttagtagaacaaagttattacaattaataaaagtgagctcataatacccactacaccttcatcatctttaaatttaagagtttttactattgaataataaaggtatattccagtaaaaataatctttaaatacaagaaaaataaactctttgggtatattaaaaagctaaaaagtgtaaatataaaagcaagtagagtacttatcctgtaaaagaaatctatttgtgtaatgtctttatattttatcataaacaccgaatataaaatgatgaaaataattgcgacgattgcatatatggtaaataacatattttcaagagtaccatttgaaattactatccacttataccacataattggccaaaataatagtgctaagaacttaaaataattatcaaacaacttttctttatacattcatcaaacaacctttcttaacaaaagcatatatttgtttttagaattttaaataatatgatatcattattatatattaatattgaatttatagaaaccaaaatttgttaaaataaatatatagattttactgttaagccagttaaaattactactatttttattatgaaattggatcaaatatgtagaaatacggcaaattagttaatattaaatatttattatttccaagttgtaaagactgtttttttaatgataaaaattctaatcttttttgaaagaaagtaatatccacattaagtatgtctgccatttcataaacgcaagtgatgccagaattaattatgtttattatatcttcttcagtaattaagaactcacaagcccattttaaggctttattttcgcacttatctataataatttttgtataataatcgttataagaggatacatagtatccaaggctagtgaaatgatgtccaagttcttcagctaagatggatgtcaatttttttgagttttgttttaaattactgagtaatgatataattttaataccatgtttgtttatatatagcccttctaaatcacctgcaatataagtggtataatgaattattatctcttcttgagaagctaattcaaaaagcttatccaaattattcataaaaatccccctaaaatagaatgtatgtttgcctttaaattatattaaaagagcagaaaaatagactgctcatcatatggtttatttttttttatatttatttagtaaaaattctatataatcattaagttgttcttgtgcttcttcaggtaactcttcatgtggattttttctatgtgcagctactgtatcaatattttccttaactaaggttcttccaagaaggtaatcaactgatacattaaatacatcagccaatttgtttaaaatgtgttcatcaggaaatctgttttctgtttcatagtaccctaagactctttgggaaacgcctactttttctccaagttctctttgagtcaatccaaattcctttctaagttctcttaatcttttggcaaacattataacaccaccttatgtatagattataacaaattgttctaaaaaataaaactaataaaatataaaagaatatttttttctaaaatctattgataaagaacaaatgattctatataatctaagtgtggaagaacaaaatattcttaatggtaatggaggtataaaacaatgtttaaaaataacttgaaatattatagaaaatgcaaaggtatgacacaaattcaacttgccagaaaggctggaattacaaatgactatatatctcaaatagaaagaggtataaaaaatcctggtcttcttatggctaagaagatttctagtattttagaacaaaatatagaagaagttttttttatacagttatagaacaatatgttcttgaaagttgtgagattagtaaaaaactgtgcactaaagagattattgtaaatttgaagctaataataagtatataaaaaaggagaagtactatggaaaacaaaaaagatatattatttaaagaaacagatgaaagattacataattataagtatttggatataaagataaagaatattaatttggacataaaaagatgtgagaatgaatactctggatgtggagcaatggtatatacagaaaagactagtaacacatataacataagttcttctgtggaaaatgaggtgttaaaaagagaggaaagattaagaaaattaaaaatggaaaaagaagatatagaaatagaaaaagagaagatagaaaatgctctaacatgtctaaatgatatagaaatggaattttttaatcttttttataatagtaagacaaaaaacaatatgacatatatttctatgaaactacacttagatagaacatcttgctacaatttaaagaaaaaaatgatatttaaattgagtgagatattataaaaaatatgacaactttacaacactttatatacactattgcaacactaggcaataaaatatgtgagataatgttattgtgaaagaaatccatattgaaggaggtgataaattgaaaagaataatattacctaaaaatatagaagatatttgacaggaataaatgagatgtatatttaaaaatgacttatatcatttatagtaagattatcagattaagcaagaatatttagtgatagtgtggtgattatttgcttaaatacaaggaaatattagaaacaattattgagattctcaaaaaaaactttactgaaagtatttttattgatgatgaaagtgtgcaaggctctgaagggtcttgtttttttgtaagtatactatcagttatttgtacacctataatgttaaatacgaataataaagatattgttatctctataaaatacttaccaaaaccacagtcaaagagtattagaatgtatgaaatttcagatgaattaaataagttattcaacagaaatataaaggtaacagacagaaaattaaatataacaaagctagaacaaagtattaaaaaagaagagtcaatttatgtattgaactttacaattacactaaattatctggatagtgtatatgaagaagatgtagtatatgaaaatatggaagaaatcaatttaaatttaggagagtgatagtatggctataggattaccaagtatcaacatatcatttaaggagctagctacaactgttaaagaacgttcagctagaggaataattgcaatggtgcttaaagatgctaaggcactaggtcttaatgaaatacatgaaaaagaggatataccagttgatttatctgctgaaaataaagagtatataaatttagctttgatgggaaatgttaacactccaaataaattattagtttatgtaatagaaggagaagcagatattcaaactgcattagattttttagagactaaggaatttaattatctatgtatgccaaaagcagtagaagctgataagactgctataaaaaattggataattaaacttagagatatagataaggttaaggttaaagctgtattaggaaaagttgtaggaaatcatgaagggataattaattttactacagaagatgtgttagttggagaaaagaaatacagtgttgatgagtttacaagtagggtggctggacttatagcaggaacacctttaagtcaatcagtaacttatactaagcttagtgatgtagttgatatacctaagatgacgaaagttgatgcagaatcaagggttaataaaggagagcttatacttattaaggaagcaggggctataagaattgcaagaggagtaaattctttaactgagttaacagaagaaaaaggagaaatgttccagaaaataaaaatagttgacactttagatattatacatagtgacataagaaaggtgataatagatgactatataggaaaggttactaacagttatgacaacaaatgtttattgatagtagctataaaaagttatttagaagaattagaaaagtcagcacttatagaatctgattctactgttgaaatagattttgaagcacaaaaatcgtatttaaaatcaaaaggagtagatttatcttatatgacattacaagaaataaaagaagctaacacaggttctaaagtatttttaaaagcaaaaataaaagtacttgatgctatggaagatatagatttatcaatagaaatataggaggattattaatatggcaaatatggaagctagaaatgtaatgagtggtacttggggagaactttggcttgatggaaacaaagtagcagaagtaaagaagtttcaagcaaagatggaatttacaaaagaggatattataatagcaggtcaaatgggtactgatacaaagtatatgggatataaaggaaaaggttcaataactctataccatgttagttcaagaatgcacaagttaattggagaaaagataaagagaggttctgaacctagatttgttgctatatctaaattaaatgacccagattcttatggagcagaaagaatagcagtaaaaaatatagcatttgatgatttaactttagctgattgggaggttggagtaaaaggagagatagaagcacctttcacatttactgagtatgattttcttgatataatttagttttatatttggttttatactgatatttagtagatatatacttaataaatttaggtagttaataagtaaaaaagttagttgattgaatttgattgataaaggagcaaataataatgaatgaaaatggattatcaaaaaatataaacatagtagatttacttttaaatgcagatacagaaaacttagaaagaccaagtactatagttgaacttaagagattatcaactatatttgggcaggaatttaaagtaatgtgtagagctttaacaataagtaaagatgaagagatacaaaatacttgtcttaaaattgatgaaaatatgaaaacggatatagacttaccggagatgcagatgcttacaattatagaaggtgtttgtgatttggatggaaagcttttatttaaaaataaggaactaatggataaatttaaggctccaacaccaaaagaattggcaagaaaactattattaccaggtgaaattaccaacctatatagaatacttcaagatgttatgggttatggtaaaaatgcagtgatagaagaggtaaaaaactaatagggacggataccaagactacaataatgtactattattggaagaaaaaaggtataagaccgtcccttttttatgcaatggataaaggcgaattaaagcttattgaagcttttttcgccttagaaattgaggaagaagttgaaaaaatgaaacatggatatggagtgtgtcctttgacaggaggtggtatgtaatgggaaatgtgagagaagaaggtataaatatgtatcttacagataattacacaccaaaaatgaaccaaattatatcagtaactgataattttaggagagcaactgtggctgtttcactttccactaatgtaatggctagtagcataaaaaattctattggaagtgcaagtagtagagtaaacagtttaaattcctcgttaagaaaagttcaaactactgctagtagtgtaagttcaactatggcaaaattaagttctagcataaatgctgtttcaggagttattggaagtttaaatggaagtattatgagactagcaataactatagctatgattattgattattttaataagttgattcaaaagaaaaatgagtttaattcaaatattatgattatattaatatttaaagctaaaagtgatgaagtagaaaaaactaaaaataaattacttggaaatttaaaaaagattggtggcaagatttggaatatcgtaataaaagcaaaagatatgactaagagagtgataagtagtatcttgggaaaattaaaacgagtagagaaacgtccttatcaaggaagtattaatcttaaagatatggtaagtagtgctatggctagaattttgcctaagttaatgttgtttaaaaatactttttggagtggtgtaatagctataaaagatatggcaagtagcattataagtaaagtatttcccaaattgagattgtttgcaggtaaggtatggagtggtgcaatagctgtaaaggatatggcaagtggaatacttggttcgataaaagggaagatatctgatttgacaaatggtgctactataggtgtcgctgtgaaaaagggtgttgacttacttggtcaggaacaaaatcagaaagttgttctagaaagtgtaatgaaaagaaatactggaaaaactagccaaaaagatgttgataagtattatgacagtttagtaaatatggcaaatgatacgccttttgaccctgaagatgttgttgcaatgggaactaaagctaaaatgattagtaatattactggtggcaaaaaagaaaaagatataactcaagctatggtagatgttagagctttaaatatgaatacaagtagtgaacaagatgtatcagcagctttcttaagtgcagcaaaaggaaatatggaatctcttaatactctggtaggagaaaattataaaacttttgatgaagcattggaaggcataagtgtaaagcagatggggttagctaaagaaatgagtaatacaataccaggtataatatcaggagctcaaacaagcattaacaatggtttgaagagtattgttaaaccttttgatgatattttaggtcaaggactaaagaaaataaaaacttttatagaaagtggattagggaatttagctggcttatctgaaaaaatggctggtaaaataggcaatgtaatgaatggtaagataattattggcaacaaatatgaccagatgcaatctagaagtgtaaaaaatggaaaagagttttctgattctactcaatatcgaatttctaatgaggctgaaaagcgtaaaatgatggttgaaaataagcaagaacgttttgaaaatcatgcagcaacaatgatagggaatgcaccaaaagcaattgttaacgcaggaagtacactattacaaaatattgattttacagcattaatagattcactacttccagtagtaaacttagtaaataatttactagatagtataaacaataaatcaccaattgcacaaggattaataagtatatttggtacaatagtaactacagcattccaactaatcggacctgtagttgaagctgttagtcctattatcacaagaatttttacttttttaggtgaatatgcacctcaaataaacaattttatagagacactgggtgttatttggaaaactgtatgggagaccttaggacctctgttggaaactggatggaaaattatagagccaatattgggagctttttttaacatattagataaagtatgtaaaatagttaaagatatatgcaaatggtggcaaactatgattaataagataaaaaatggaagcatcacaggaacagttttaaatctagtggaaaagagtaaaaaaaattacaaagataatccatatgctggaacaaaggctggtgattctggtaaagcttattcaagtaagaaaggtaataatgcatttggattgaactatgttccttataatgactatcaaaccagactccatgaaggtgaaatggttttaactaaacaagaagcaaatcaatatagaagcagaaaaaatggtggaaatataaacatagctaagttagctgatacaatagtgattagagaagaagctgatatagaaaagataacatcaaaattagttgcaagtatccaattggcacagttagggggtgtcttataatggaaatgtggcttagacaagcagaagatagatttagatttccagtatttccatcttcctttagtattaatggaaaagctgctgtaaactcttctagtatactcaaaataggtgaagtagcaacttttggtggtgtagctcttaaaagcatttcaatatcaagtttttttccaaataaagactacactttctgtgactatacaggttttccatcaccatatgattgtgtaaataagatagaaaaatggatgaaggaaggttttatattaagatttacaattacggaaacaaatataaatatggaagtcataattgaagggtttagttatgaagaaagagatgggactcgagatgtatattttacattagatttaaaagagtataaaagaataaagataccaaaagtaactccaaaacaataactattatagataataagttgtaagtaactgctgatagaattaaatgaaaaggcaggtgattttttattattaagatttgggtacacataaaaaacggaagtatatatgacataactgacatagtagacaaggtatcatggtcaggtgattataaatctccatcaaggacactagagttttcaataatacaatcatcatttgatgtaaatttccaacaaatcgatataccaatagctagtacagtctgtttctatgtagatgagaaagaactctttagaggaatgataattaataggtctaaagattcaagcagtaatgaaattagttttgtatctaaagatatgggatttttacttacacaaagtgaagtgtcatacaattttaaagataagttagttgaagacatagcaaagcaagtatttgctgaaaataggctttcagttggaacaatagcaaagaccaatgtcaagtatacaaagatgtttataggagtaaatggttatgacacaataatgagtgcatatacagaggcaagtaaaaagacaaagaaaaagtatatgatagaggctaatttagataagtttaatgttattgaaaaaggaactgttacattaagtgttatgtttgaagagggatttaatattataaataccaccttttcggagagcatggaaaatgtaaaaaataaagtaatagtggtagaccagtatggaagcaagattagcgaaaaaatagataatgaaatttttaaggaagtaaatgtaataatgcaaaaagtaattcagcaacaagaaaatcaagatgtagatattgatagcgagtttaatgggatagaaaaaagctgttctcttaaaggttatggagatgtaagttgtataactggtagaggagtaaaagttaaagattcttatacaaagcttgtaggactattttatatagatacagacaaacatacttggcaaaatggagaatatcaaattgagcttgaacttaattttcaaaatcttatggatgaaaagtcagcaggacaggatgaacctaaggaagaaagtaatttagggggagaagattatgcaggaggaaaagagtttacagcagaatttacagcttactgtcctagaaaagaagaaggtggagatacagattgtagaaagaaaaaacttgacccatctaaaaaaacttgcgctgctcctatggttggtaaatatgagcaaacttattatacaaaagagtttttaaataaacatcctttattgaactatggagatgaaatacaggtaattacaggagtttctggtcgtgatggagtctataaagtaaatgacgtaggacctgcaataactatagaaaaaaatggaacataccatatagatattttatttggaaatgttgaagaagctagtaaatttggaagaagaaaaggaaaaattattattggtggttattctggtaatgtatctgataaagctaaaatagtaatatcagaggcaaaaaaacatctaggtaaaccttataaatggggtggaaatggaccaagtagttttgactgttctggtttaatggtctactgttttaaaaaagttaatgttagtttgccaagaacgtcaaatcaacaatctaaaaaaggcaagaaagtagaacaaaaaaatcttcaagcaggagatttagtattttttcataatccagtcagccatgttggattatatataggtaatggagaatttttacatgctccacaaaaaggtgatgtagttaaaataagtaagttaagtagtagaagagattttaatacagctaggagagtattataaaaggatggtgatataatggctaatccaataaatgaatttataggaataataagagaagaaggaaagtatcataatcaaccttctttttttattggaaaaattaaaagtaaattaccagatttaaaaatagagacaaataacatcatattagaaaaagaagatattttgatagatagttggatgattgatagacagctagaaacatttgacacagaaacaaatcaagaacaccagcatgaagtaaaaaatccttttatagataactttgaatctggggatatggtaataatgtttagaataggcgaaaaatttgctgttgtaagtaagttggtgagcttataatgagtacaatatttccttttataggtgtcccagaggattatatcttacctaaaacagaagaattgccaatctttcgtgaagtggcatgggattttgaaaaagatgaacctattttagaaaaaggtgactttaaaataattgaaaaaaaagaagccttaaaagtttggatatacaagtgtataaagacaaatagatatgaacatgagatatactctttagaatatgggacagagctttcagaactaataggacaaaaatatacaaaaggtcttacagaaagtgaagctagtagattcataaaagaggcccttctaataaatccatatatattagaagtaaacgtaaaaagtgctaactttaacagagacgtattgagtgcaaatgtaaaagtatccactatctatggggaggtggaaataaatgtatagtgaccagacatatgaagtaataaaaaatagaactcttgaaaatattaatcttgatatttataaaggagaaggttcttttctaaacaacatggtatctggaaataatctagaactttcgaagatatatctagaactttcaaagatacataaaatggcttttatacaagacacatataaccagtttcttgataaaagagtcaatgaatttggtgtatatagaaagttaggtacagagtcaaatggagaagttgaatttattggagagaaaggaactgtaataaataatggcacaataatatcatatagagatttactatttgtagtaataaaagatgtaactattggtagtgaagaaggtgacaatagcccagttcaagctctggaagttggtaagaaatataatttacctacaaattgtgaatttaaactagttgataatatatctggagtaacaaagattactaacacaagaagttttgaaggtggtacagatatagagacagatgaagaactaaaagaaagattttataaaatccaaagaaatcaagctacaagtggaaataaagctcactatgaagaatgggctttggaagtagatggagtctataatgttaaggtttatccaagatgggatggtccaggaacagttaaggtcttgatatttggggaaaataatcaagctgttgatacagaaacgattgaaaggtgtcagcaacatatagatgaagagaagcctattggaccaactataacagttgtgacaccattaccaatagaaataagtataagtgcagtaatgaaactagaagatggatatacattagacaatgtaaaagaatctttcctagaaagtataaatacatactttagagatattagaggagagataatctatacaaaagtcatgggaatacttataaatactactggtgtacacgatttaagtaatctacttataaatggaagtacagataatataactattaatgaagataaaatacctagtgtaacaactgttaattttagtgaggtggaaaatcaatgaagctaattgataaactaccatcatttgatagaaattacattgtagaggagatacaaggtgcatacgatacagaattaaatattcttaaagaagatattgatgatacctttaaccaattatttgttgatacagcgacatggggattagatatgtgggaagacatactctgcattgaaaaaaaagaacttgattttgacacaagacgtagcaatataaaagctaaaatgagaagcagaggtactagtactattgaagttataaaaagtatatgtgaggcatatacaaaatcagaaacagatataaaagtttatagtgatgaatttacattcgtattgagttttatagcaaataactgtgactataaaactcttttagattgtagcgagatgattgaaagagtaaaacctgctcacttattacactatttagaaccaataatactagataaaagtatggtctattgtggtggaggtatggtatgtagtgaagaggtaaaagttcatccatactttgaaccaattataaaatgtagtgctgttgtaaactgtggagctggaatgttaagtagagaagaaataaaggtttatcctttaagcattaaatgcattgaaaataattgtaagattaatatagctattgcaaatgatacaggcgtagaaaatgtagtagtttatcctaaatcggaggtggtataattggaagaaaaattttatataatattaaccaaaattggtagagaaaaaatagcaaatgcaactgcactaggagagcttgttggattaaccaagtttcaagttggagatagtaatggagaatattatgagccaacagaggaacaaactgctttaaagaatgtagtttgggaaggaaatataaattctctaagaattgatgaaaaaaatcctaattggatagttatagagactattttaccaggaacagttggtggatttatgataagagaagctgctgttctggataatgagaataatataatagctataggtaagtatccagagacgtataagccacgtgctgaagatggcagtattaaagatttggttgtaaaaatgattttacaattgtccaatacttcaaatgttacattagaagtagacccgacgttggtttttgtaactcaaaaggatattcaagatttagatgataagtttgataaaaatataaaagaaataaaagtaaaaattggagatacagatatattaactacagattctaaagatttatcaggagctataaatgaggtagttaaaaaaatagaaaatatatcttttgatgatgttataagtggtcaaatacaaactgatatatcagtattaaaaaatagctataacaaattatctgaaaaagtgctagatatattaatatacctagaattagagtcagaagtaactgtagatgaggctggttattggtatgatacattagcaaatggaaataacatagtagctatagaagggcttaagttagatttaaatagaaaatgtataacaggtgaaattggtaatgtgatttttagagatgtagtattaccatttagtgcaaatagagttagatatatacatgatatggataataactttgttgagacaaaatctagtaacacttatttaaaagaacaaaaagatataactctaagtaaatattcatatgaaataagataaataaaggaggtagtactaataatgaagcaaaataaacttttacagcgtggtgcttattttaatgataagaacatattgattgatgattttgataaaagatataatgattatgattttgtagaattttttactggtataagtaatagtacctttggtttaaaatcagatggtaatttatatgcttgtggcgataatacaggttttcaactaggacttggaaaagattcgtcagagagaaggatgtttagtaaagtaaaaattgataatgtaaaatatgtatcttgtggttcaaaacacagtgtagcagtaactaaagatggatttgcatatggagcaggaacaagtaatgtaggtcaattaggtgtaattgagtctacagtatattatgaatttactaagctaccaatagatgatgtaaaaactgttgcatgtggttatgactttacatttgtgcttaaaaatgatggaacattatattcagcaggtttaaactcaagtggtcaacttggactaggtgatactaacaatagagctacttttactaaagtaaatatagatagtgtgaaagatgtagtgacttataatcaatctgtatttatcataaaaatggatgggacagcacatgcatgtggattaaattcaaatgggcagttgggaattaatagtactttaaataaaagtgtatttaataaaatagaaggtatggataatgtaaaacagatagcgtgtggtagtagtcatacaattcttattaagaatgatggaactatgtatactacaggctataatggagttggtcagcttggtacaggaaataataataattcaattgtatttactctttctagtataaataatgttaagtatgcttcttgtggaaataatcatactatgatattaaaatacgataatacactgtttagtacaggacaaaacaattatggtcaactagccaatgccaataaagatgtagcatcaagaaatacttttgctaaggttaatgtagaaaatataaaagatattaaatgtggttctcaatttaattttttaataaatggttcaaaagagatatttgtatctggctgtaatttagcaggtcaacttggttcattttttcatacaacttttctgtatgagttttcaaatgtgcaatcttcaaatttagataattattcaggtttattggttaatgatgattatttatatgttacaaaggacaatagtgaatttttaaatgtaaagttaagtgataattttcaagattataagaagatagagttaacagatagcaatatgtttattgttatgaatgatggtacattgtatgcttgtggtttaaataattatggacagttaggattgggagatactgttaacaggtcagttatgactaaggtggatatagataatgttttggatataaaaggaaacggaaactcaacttttgtgcttaagaataatggaacattatattcatgtggtttaaatagtaatggacaattgggtttaagagatgaagttaatagaaatatatttacaaaaatagaaatagagaatgtaaaggatttttgtgtaggaagcaattatgtcatagctttaaatcactcaaaagaagtatatggatggggaaataatccttataataatatagaaaaaacttctaattatccatataagcagggaataagtaatattgaaaagatagcagcatatgattattctgtatatatgataaacagtgaagggaaactatatgtttctggatacaattataattatcaattaggtaaaggaaataatagtaaccaaagcaaagcattagtatctcaatgtagaacaaattcaacatcttctacatcaaatggacttagaacgttacctaaaataactaatgtttttcctttttatgatggttgtgcaataattgacgaaggaggttatgtttatttaacaggatatcatggatatttaagaacattaaatagcagtccaagtatatctgattattcaagatatggaacttttattgaggctacaaattcaaatcataatacttattttatacaagagactgattttagtggaattgaaaaagtaatagggatgtcaaataatatattattttttaagaaaggaagttcatatattactggatatccaaaaacatttggctcaaccattactggacatagaagttatactagtattaattctgagagttctaatttaggaagtaattttataatatatcatagtaattccaagttatatggaaaagggattgctaatagtgggcaatttgggaattcaacaaatatagatggcacaagtaactatgatacaggattaaaagacataaaagatataattgtaaaaggaaatactgtagtagtagtagataaaaataacaatatatatgtaacaggaatgaatcagaataacaaacttgggataggggaatataacaacgaaccagtaaaaaaattcacaaatataactgaacaatcaaactcatttatatttatggatgatataaaagaaattacaacatcaagaaatacaatgtttatagtaaaaaatgatggaacagcctatgccacaggaaataatagttctggacaattaggattaggtgacacaataaatagaaataagttcactcagataaaccttgataatataaagaaaatatcaacaagtatagatggtaacacaacatttgcaattagaaatgatggaacactatactccacaggattaaataccaaaggacaactgggattaggtgatatagtaaatagaaatacatttaccaaagtaaacatccaaaatgtaagagatgttgttttagggactactcactcgcatgcaatcaaagatgataacacattatattcatgtggagaaaacactcatgggcaactgggcttaggaagcgaaagcaaccatccagacgtattgacatttactgtaaacaatataactaatgtaagagatgtgtactgctcagatacaacaacatttattgtaaaggacacaaacattgcatattgttgtggatacaataataattcacaactaggtatgggaaatactactgaccagtatagttttataaagtgtatggaaaatgtaaaagaagttataccaaatgaaataaatacctatataataacaatctataatactgcatatagtacaggtttaaatactgattattgcttaggtctaaatagtaatagcaatcaaagttcattttctgaaattccaatttcaaatgtagtaaaagtagctccaaacagaaataatgcagtacttttacttacaagtgaaggggatgtatatactgcaggcaaatgtagtaatggttcaggtacaggaagtgagactccagagaagattaaaaaaatagcatcaaaggcaaaggatattggaatgaattatagatgtggacattatgtaagtgataatggagacctatatggtacaggttttaataataatggacaattaggtgttggtgatgtaacaaaaagagatacatttataaaaaccaatacaagagtaaagaaaatacttcctttagaatatgcaaatatagcaataaaagatactaatgatatatatatttgtggattaaataactatggacaattaggtgttggaaatagatacgatagtagaaataatgataatagaatatttaattataagcatatgaattttgtaatgggtgatttgacatctattaaaaacagacataactttatacttctaaacaataagatagtgatacctaccacaaaagacatagattatggtttagtattaggaaatttatacaaaggagacctttatactgagcttccatatgaagatataaaagaagtatctatttctaagactcatattattatattacttaatgatggaacaatgtatggatgtggtacaaactaccatggagaattattgcaagacttgtctataaatcaagtggatgaatttgtgcagattaatgtatcagatgtaaagcatgtttcatgtggagataactttacttattttataaaatctgatgatagtctttggtctattggtaaaaattccgaatatcaattaggtataggtcacaataatccagttactgaattacaaagaattacaactatatctagctgtaaagaagtacattgtggtaaaaactatacattagtagtaactacaggtaatgaattatttgtacaaggatataatgataagggagctttaggattaggaagcgatagtgaaaatactataattaagttctttacaaaagcactaacagacataagagaaataaaatcttatggaagtgaccatatattagtacttaaaaatgataattcagtatgggttactggaaaaaatagggatgtatataaaattgaacaaccagtagaatttttaaaagaatttactatagtacctatttctgaagatgtaaatacagtaaaggatgtacttgcaacagacaatacattatatattatatcagaagtaggaacgacaaatgctgctatagaaattactgaaaaatcaatttcatcaattaagataaaaatacaagaccctaataaagatataagtagaatagaaatgcttataaatggtgaaagtgtaaaatctgtaagtgatttaactactgaaaaaatatcctttgaagtaccaccagataaaattaaaataggagagaataagatactatttagagcttattgtaaaggtgatgatttatatgcatctttatttatttttaaagagagtactggaaattctataattaaagattcttatgttatgataggtaatagaatgtacaaggtagttaatacaacatctaatgaacaagatattacaattacactagatagaggacttgaagaagatttaaatcttggagaccctatatatcaattaataaataaaactaaagttcaagtaaaaataaataaatctgacttattcaaagacatgaaactagttgaaatcaaaaaatcagactcaagttatcaagaaatctatgaattagaagaagccaacataaaaagtgctcagcctaaaatcatagtagaaaaaggagataaatggacagctataaaacgtccatctatgatttttagatatgatgctgaaaacaacgagccacaagcttaaaatggaggtgtaaaaattgtttaaattcgataaaaataaaatagaacaaatcaaacaaggtagaaaagtagaaatgcagtataaagacatttcagacataagtataggtcaagcaaagcaagatgatgatataacaaataattttatagcaaatgcagaaatatatgagatgttgttaagtcaaagttctgtcaatgaagcaagtaatataagcacttttagtgtaagaaaatctggaggtgagagtggaatggtagaagtatatgtagctttaattttaagaggcagaaaaacaatagaagaagtaccagcagtaattagagagcaagttagaattagatgtaaagaattagaaataccagttgaatagtaaatttagaataactatgtattagttattttttttatgtaaagtacaaggtcttaactttaataagtaagccttgtacttattttttgttatattagaaattgtatatatatttattatttattcaatctataaattaaacctacaatttaaagtacagaagattaaattgataatcctgaaaatataatattgcatgatgtaagaatataacaaaaattaaagctataagtataaaaaatttagacaataggaggctataatggataaattaataaccgaattgagtagtctgggggcaataggtatactatgtgctctattatttaaaaatactatgcaggagaaaaaagaagatagagacatgtataaaaaaactgtagaaaattttatagaattatctacacaacaacaagaaataaacaaaaatatacttgttcaaatgggaataatgaaaacagatgtagaggaaattaaggaagatgttactgatataaaaggtatgttacaaaacggtgtataacatgaaagtagcagtagcaccagattatatattattaggaaaagataaagtagtattgtagatagtgccctattttattgagaaggattttatattttaaaatattaattaaaaaaagtaataaaaataatatataaaaataacatataaaaattcaaaaaggagttaagcttaaatttgattagaaaaaatcaattttaagacaactccttttttttattaaattattgtctattaaccaaaatagctattttagcatctggattataacttatctgaaccatttgatttttcttaacatgttcaaggtcttcaccaccataagctatttgtaacttaactggtaacttaccttgttttataatagcaacgtactcttttttaccttttttctctaaactaatcaaattgccaacataaggtttaaagttctgatactttttactagaatttcttatgtagaagaaagcaccaacagcaataactaaatttatgccaagtgtaacccaagaattgattttaagcatagctccagcgattattatcacgaacattaaaacgataggtaatatagctttcttaagaagcaatttacccattatttcattagcctttttctcagggccactcatagtttttgatctagcaaatgattgcgcgaatttgtctcttaagcccattttatcctcctaattttaataaatatttagttataataacgagatattacttgaaactaaaaatttactacatttatattatgtttgacttttgtataaataattacattcaagtaaagcaaaatatactaattattttatcataaaattataaaaaagaaaataaatgaaataaaaatattagaacaaagaaatgatgtaaaatcgtatcaaaagcaacataaaaattatttatctattttctcatctttatttttgttatactcaatttttcctaaatccttctctttttcatattcatgaagttttaattcaatcataccttctattttggctttatcataatcatttaactttctaaagttgtttaaaagctttatttcattagagtttatgctattaagtggatagtttgaggaggaatcgcaaattaaatctgatttatgtgatagattatctccatttaatagccagtctactgaaacattaaatatctcagctatagattttaatatttcataatttggttttctaatgtttctctcaaatttacttaagttgtcacagcctaacatttcttctagttcatattgtttaaggttttttgcttttctcaaataaacaattctttctcctaaagtatccataaacactctccattcaattaatgtcaaaaagactttttaagatgtaaatagtttcaaattaaaggtcaaaatgacataaaaaccattgacttaaggtcaaaatgactttataattaacttaatgatacgaatttacatcctaattttagcacaaagtaatcaaaaaatcttatttagtattaaataaatttatatacttaatatgtgtacatattaaaaatatatactaaatagagggggtgcgtaagctaaagtaatataaaagtaaatataaatcacttagaaaggaagttgataaatggatgctcgaaaaaaatggataccttttttgggagtgcaagtcaagcaaagacttattgaattaaatatgactcaaagggaattagcgaagaaaataggtgttaatgaaaactatttgtcagctattttaaatggaagaagaacaggtaaaaaatataaatcatcaatttatcaattacttaatatagaatattcagaagatgattaataaatagtatataaagtaggtgaatattcttgtgtgcaaattggattcagatggggttatagagtgttgtagagcaattgatgattttattacagcacttagtaatataaaaagcttaaatatggaaagattaaatactttaactaaatattctagtacatgttcaatccttcttaaagaggggaattatgaaggatgtacaattgtgtatagaaagatgttggaagaattaaaaacatgagtaatgcatttcttaggaatataaattatacatagaaatgtattatatttttcaaagtacttaaactaaaatatggataagataatctaaatattataaatgtgcttgaaattagactatacttgtttttaaataatccaatatccatattttagtaatatactacaaaaaaagaaggttaatagatgatgtaaaatcgtatcaaattatgtatgtttaaaccattttatcttcattattattagaggaatgcttttttaagtctttatattcagatatcttaagttcaagtattccttctatttttattttatcacgttcgtttagttgtctgtatagatttaatatcatcatttcatcattagtaacatgtaagtaatcttctttatcttcttttacactactattgacatttaccttctctttaccatagagaagccagtcagtcgtaacattaaaataatcagctattgacattagtatatcacaattaggttttctatctcctgtttcatacttgcctaagttttcaaattttaaaatatccataagtttgcgctgagtaagttttttggagtttctcaaataagcaattctttttcctaaagtatccacaaaatacactcctttctttttatgagtaatgtctaaatgacatttgaaattaaaaatatataaatttataatataaaactactaaattaaagtctaaatgacattttgcttaaattaatatgctcataatatgattttaacatattatagttgaaaatatatggtttattttgatttgtatatataacaatagatttaattgttataaaaatgtaaaggggtgtatgaatagattgtataaatttatttcgataaactaagattgctttttgattgtctgtaaaagagaaaaagattaagataaaaatagtattatattgtaatttatattaatcaattacaaagattttatgaatttattctttagggtaaaatatttaagaataagataaatttacaatataatactataacactcttttatctagttttattttctttatagaacaataatattataaatgctagtagatttacacagaatactgttatatacatctgtttgaatcctgagtttagagtagattgtagtgtattttctatttttgttctattattttctatggaatttatataatccaattttgatttatcaaaagcctttggtatttcagtttttacctcttgtgtctttgctaaaactgcttggagtgattttttttgctgttgcattgtatcaaggcttttttccatgtctttcttttggtttatagaattatttaacttgctttgtagctctttcttttgagattccattgatcttagttttttacttaattcgttcttttgagttttatttttttgtaactttgtatttaagtcatctcttgtcttttttagttgctgtatttgagcatttaaactttctttttgttcatttacatttggtttattctcgctggaattgttattcttattttctgtagaatcattcttagtgtcgtctgattcagaattactggtattactctggttttgttcatttgagttattttcgttatcagtaggagtcttttctgtagtaggtattttattataagcagttgtaagttccttgatggcctcatcttgtttttcaagaccttgttccataccttttatacctttgtcaacaccagcaatacctttttttacaccatctattccttgattaataccagctctagcttttaccatattgtcaataccagtttgaactcctttaataccactatttagtttattttcaccatcttcaataccgtttattccactttgtgttccatctattcctttttgtacatttttctgtattttagtaattatagatggaactttttcatcaaacattgttgttgatatttcttttgttatattggtaatgttggttgtatctgctgactgaactttattaagtaaggattttggaagtttgccacctgtcatgtccatatttatatttgaagtatcattcatatttgggatagagacattttttaaattttttgccatttcagggtctgattttaagtcatctatcatgttttcaagttcttcaagttgaactattttaggagttgagggctttccaactaagtccataatattatcttgcacagataatcctgcatgtgctataaatccaatcattatagctggagaaattgaagtaccaattgagcgtatcaaggataatgttgcaagtgctgaattagattcttctaatcttgtatttgataacatcatatagtttagaggagttcccatagtaaagcccattcctaatcccataaatattaaacttacacatacactaaatacagtattggtttttagagcaattaaaactaggtaaagagagcctatcatagatacagaaaatcctagtaatagtattttctttgccccaaacttgtcaataagtcttccgcttaaaggagcagcaatacctgcaaataatcccaatatagctacaaaatatccaccagaaccagcatttatctttaatgcattttcagcatactgtggaacgaataccatacccatcattccaataccaacaattaaagataaaataagtactatcaatattctcggatttaaaaaatattcaaagcttaaaatagggtctttagctctattttcaataaatatgaaaataggtataagtacaataaatgtcaataagtatggataaactgatatatcttgtatagaatttttaaaattaaaaaagtctatattcataagaccatataatagtgatacgattatacatatcaacatcaatgtaccaagcttatctattttttctttagattcagacttattgtttttaatacagaaaactccaccaataagtatgattaaacaaattggaaggtttacaaaaaatagccacttccaattttgagttccaaagatacttagaattgtgctaccaatgcttgaacctaaaatattggcaataccatatgttgccccaactaaacctaaagccatgcctcttttattttctgggaaggtagttccaaattctgctgtagcaattggcatgattccaccaccaccaattgcttgaataacacgaccaattaataaaatatagaaattggaaaatagtgatgataatccacatattaatgaaccactaccaaatagaaatatactaactagatacacatattttcttcctattttatctgctaattttccagagataggaattacagaagcgtatgttaatgtgtatatggtaatcatccaaattcccgttttttcatttactccaaggctattttgtataatcgttcttgctggtgatactattccagtatcaatagctcccataaatatacctaatagataaagtgtaagtactaaaaatatttttggattactgtccttgttcttaatactagtattatgattcaaggtaaacaccaccttaatgtattaatttttcaatatagggttttaaatcttcaaattctatatgaagatatgttgaatatgaaaaaaacatttttattatgatattgcatactaatttgtcattattaaaaaaactttctttttctaaagcttcatatactttatttgaaagctgttcatgaaagtcgtctttgtgttttttcatttcaaaaaatctctctgtttcaaaagtgtttaaaaagtcattgtattggatattatgaactttgtttataaaatttcttatttcagtaaaaataatgtttagtttttttatgtaatcttcagtgtttttattggagtattcaattcgccttatcaataaatcccattcagattttgtgatatattctattatttcttgttttgaattaaagtaattatatactgtacctgcacttataccacacctttgagctattttccttatgctaatattcgagtaatcttcttctaaaatcatatcccgagatacttttaatatatcttcttttacattttctaaaatctttggcatattaccacctcttttattaaaattattatgaacactgtttattatactcctttaaaatttattaatcaatatgtaagctataatgtataatattattatatagatatgatagaaaataagtgtctttttataaatatctattatattaaatttgtacttaagtatgattatttattgaaatatgtgatattaaatttttctttttaataaattaaatattatatgataaggagaatatggtgatggaaaagaagtatgtaatggcattagaccaaggaacaaccagttcaagagctatactatttaataaaaaaggcgaaatagtgaaaattgcacaaaaagagttcaatcaaatttatccaaaagctggatgggtagagcatgaccctatggaaatatgggggtcacaaagtggtgtaatgagagaagttatagaaacagcaggtataagaccagaagaaattgcttcaatagggataactaatcaaagagagactacggttgtttggagtaggtatactggtaaacctatttataacgcaatagtatggcagtgtaggagaacatcagaaatatgtgatgaacttaaaaataaaggattggaagaatcaataaaagaaaaaacaggtcttttaatagatgcatacttttcagcaacaaaagtaaaatggatattagataatgtagaaggagctagggaaaaagcagaacaaggagagttattatttggaactatagatacatggttaatatggaatttaactcgtgggaaagtacatgtaacagattactcaaatgcatctagaacaatgatgtacaatataaatgatttagaatgggatgaggatatattacgagaattggacataccaataagcatgttgccattagtaaaaccttctagctatgtttatggtcatacagatgagcgcatgttatcaggagctaaaatacctattgcaggatgtgctggagaccaacaagcagcattatttggtcaaaattgtgttgaagaaggtactgcaaaaaatacttatggaacgggttgtttcttacttatgaatacaggcagtaacatagttaaatctaagcatgggttacttacaacaattgcttggggagttgatggaaaagtaacatatgcattagaaggaagtatatttattggaggagcatctgttcaatggcttagagatgaattaaagataattgaatctgcaaaagatagtgaaatgtatgcaaatagggtagaggatactaatggtgtatatgtagtgccagcatttacaggtcttggagctccatattgggatatgtatgctaggggttcaattttaggacttacaagaggagcaaaaaaagaacatatagtaagagccacattggaatcaattgcttatcagacaaaggatgttttagaagcaatgcaaaacgattcaaaattaaaactaaaatcattaaaagttgatggtggagcaagtaataataattttttaatgcaatttcaatcagatatattaaatgtagatatagatagacccaaaatagtagaaactacagctttaggagctgcttatttagcagggttgtctgttggattctatattggaagaaatgaaattacttcaaagtggtcagtagaaaaagagtttaatccaaatatgagtgaagagaagagatgtaaattatataaaggatggaaaaaagctgtatcgagagctttaagctgggaaaaagaagatgaattggatatttaaaaattaatcaaagttaaatttatttgaatttaaaaagagctttatgtaaaatatgaagctctttttttgttgttaattttgcatttttatataatcatactaaattatataatttatttttcgttttcatataaaaacattggtatagaattgtaaatgtgttggtcaccaactactaagagaatgtctccttctaaaaattcaatatatggtccaggagatattataagttcttcacctcttttaattgcaactattgtagcacctgtattttgccaaaatttagtttgtgcagctgtttgaccaatatatttgcaattagaatttatggtgaactgaacgggcactaaaggattgattatttcaagtctgttggaatagtctaaaattttatttatagtatctaatatttcattttctaaattagatttagtatctattaaattataaagtgttgatttatatgatgatatatttgtaatatctctatatttttttataaaagaagaagctttgtctggagatagtacaataacacctttaccctttatgcttttaacaacgccaatgtcctctaaaattttgacagctcttcttatcgtttctggagatacattgtatttaccagccaaaacagagcgtccaaatagtactgaatcctcttgtatttcacccgtgtatattttatttgcaatatccaacgctattttttggtatattggcatcgtatagtttttatccattgtttttcccccaatacaaaatttatgttaaaaaaatatataatcttaacaatactattgtataatttataggtttatatgtctacaatatgtacaaatattgtgcatgttttaaaataatattttaacatgcatttagtatacatgattttattatacttaaaactatataaagaattaattataaaaatataaagatattttacttacaaagaatgataattatatagatgaaagaaacaaataaatgaagaaaaatgattctgtcttgcatataaagtgattaaaaatgaaaaatactttaaaaatgaaggttaaggcccttattttaagtgaaaataattaattattaactaaaaaatggtaaaaagattttttgaaaaagaaatacaaatgaatgttcaattaaaataattgcaaaaatattccttaaatggtaaaattatattaattaaatgcaatagaatagttgcaaaaataaaattgaatacaagtgataaaatatttcatgcaatatataaaataaacaaaatttaaaaattaaaactacttattctatcaaaatgttagcaaggagggggtcataaattgtataaagtagatttaaatagtgatttaggagaaagttttggaacgtataagattggtttagatgaagaagttttaaaatatatttcatcagctaatatagcttgtgggtttcatgcaggtgaccctagtcatatggaaaaaacagtacagctagctaaaaaaaatggagtgaaaataggcgcacatccaggtttcctagatttaataggatttggaagacgtgagatgaaaataacaaagcaggaagctaaagattatacaaaatatcaattgggtgctttaatggcatttgcaagttcaaatggatgtaatatacaacatgtaaaaccacatggagcattatacaatatggcagctaaagataaagagttagctatggggatttgtgaagctatatatgaagtcgataaagatattatactgttggggctatataatagtgaaatgataaattctgctaaagaaattggacttaggtttgcaaatgaagtatttgcagatagagcttatgataataatggttttttggttccaagaagtgtagaaggagcagttatacatgatacaaaacatgcaatagatagggttgttaggatggtaaaagaaggaactgtagaaactttaacaggtgaagttatacatatcaaagcagattctatatgtgtacatggggacaatccaaaagcaatagagtttgtcaaagaaataagaaagcgttttgaattagaaggtatagaagtttgtccattagaaaacatagaagtttgttcgtcagagaacatagtataagactgataacatgagggggagataaaatatgagtacaaaaaatattacagataaaactaaaaataaaaaagatgtcggagcacttataggggctgcatttataatggcaacatcagcaattggaccagggtttttaactcagactgcacaatttacccaagattttggaccaaatttttcatttgtaattttaattacaacaatcctttttataggggctcaagtaaatgtatggagagtaattggtgtatcaggacttagaggtcaggatatagcaaataaaataataccgggattaggttatttagtagcttttttagtagctcttggaggattagcttttaatataggaaatgttggtggagctgcacttggtatgaatgtaatgtttaatatgaatatgacattaggaactgtattaagtggattaatagctatatttgtatttatgtcaaaaaattcaaattctctagtcgataagataactaaatttttagcattaggaatgataattatagttggatatgtagcaatatcaaatcatcctcctgttggagaggcagtatcaagaatggtaaaaccagaaaatccaaaaggattgatattcccaataataactctacttggaggaagtgttggaggttatataacttttgctggaggacatagattaatagacggtggaataacaggagaagaaaatataaaagaaataactaaatcttctcttttgggtatattagttgacacaatgatgagagttcttttatttttagcaatactggcagtggtttcaaaaggtcttcaacttgacccagaaaatccagctgcttcagcttttaaatttagtgcaggagcaataggatataaattctttggacttgtattatggtctgctgcaattacatcagttataggagctgcttatacatcagtttctttcttaaagacactaaatccttttatagataaatatgaaaaatattttataatagcatttatagcaatatcaacacttataatggcatttataggaaaaccagctactttattaattttagcaggagctttaaatggattgatacttccaatcacattaggaattatgcttatagcatctaaaagaaaagatattgttggagattacaagcatcctacatggcttttaatatttggattaatagtagttttaatatctgcatatacaggaataacttctcttagcagcctaggtgctttatttgcttaatttagaagaggtgacatttatggaaactagatacttgatatcaggggataaggcagtggttgctgaatttggaaatgagatatcagaagatataaacaaaaaagtaatttcatttatgagagcaatagaaatatcgaatcttaaaggtattgtaacagaaatggtaccaacatataggtcacttatgataagttataatccattagaaatagattttgatagtttgattgagaatttaaaaaaaatagaagataatttggaaagtatagtattaccaaaacctaaaatacatgagattccagtatgttatgatgaggtttttggtatagatattaaaaacgttgcaagctacaataatctcactgtagatgaagttataaaaatacacacaagcagagagtacttgatatatatgctagggtttactcctggatttccatatctaggtggtatggatgaaagaatagctacacctagattagaagtgccaaggactaaaatttatggtgggagtgttggaatagcaggttcccagactggtgtatatcctattgatagtcctggtggatggcaaataattggtaggacacctttaaaattatatgatgaaaatagagaagaacagattttgcttagagctggagactttataaaatttgttccaataacattagatgaatttatagaaatcgaaaaaaataacttaagtatttaaatatcgttatagtacagggagtggtatatatgggattcaaagttgaattaggaggtttccaaacattaatacaagacagaggtagagttggctatggtcaatatggtgtatctggatgtggagcaatggatgagtatgcacatagagtaggaaatatattagtaggaaattctgaagatgaggcttctttagaagttttaatgttaggtcctacaattacctttgatgaatatacgcaaatagcagtaactgggggagatttaggggctaaaataaatggaaaagaaattcaaaactggaggtcatatcaaataaatccaggtgatgtattatcatttagaggtgtgaaatcaggtgctagagcctatgtgtcaatagctggtggaatagatgttccacttgcaatgggaagtaagtcaacttatacaagatctaaaattggcggatttgaaggtagagcacttaaaaaaggagattatataaatacttttattcaggaaaaagattttacaataaataaaaaattaaattcaaaatatattccaacttatagttcagaaatcgtactaagaattgtaaaaggtcctcaatttgatgctttttctaacggtgaagtagagaaatttttatcaaataaatacaaagttacgaatgaaatagatagaatgggttgtagactagatggagagagtataaagcaccttaatggagcagatattatatctgatggtatttcttatggagctatacaagtacctggtcatggaaaaccgattataatgttatcagatagacagactagtggtggctatactaagatagggaacgttataagtgtagatttgtataagttagcacaagcaaagccaaatgatgtagtaaaatttgaacttgtagatatatatgaagcacatagactattgagagagcaagaagataagattcaagatatctacaagagtatgaaaaatataagagttgtaaaggcaaaagtattaaatgatatagcagtttaatttaattttaacaaatacaatttttattataatttataatataacttacaaatagctatttactatttaccataattaagatggtttagattagtcaaatagctatttttttagtttgagtaaatattttaaatttaaataaatacttcaattttaaaataaaagcaatatttaaatttattatattatctacaaaaagtaggtgtgttatgttgagtttatttagattttattggccaaattggaggtgatataactccatatccacgagctattgtatctttacttggattgatgattttatgtggtacattagcttttataaatgttgagtcacctggatttaatctaactaccttttcacccatacaaatatcaaccacaccactcgttaccaccataatttcttctgatgcatgatagatataatctttagcatcctcactttctggtttaagttcaaactctacaaataaaattgaaggtgtaaattcagttgtaggcattggagatactatctcgtaaaacatttcactctttggaaatttcatcataactctatcttcttttctaattactaaatcatcagtattattgtcatccataaacatatataaaggagtgtctaaaacttcagcgatttttctcaatgaagacaaggatggttcaatagcatctctttctatttgagagatataacttatagataaatctgtcaatttggaaacatcacttaatgtttttttcttgctttttcttatatttctcatcttttcacctagcataagaacctccaaataataaaattaatataaaatattcgcttaaaacaaagtaattatagcacaacatagaagtagtggcaataagaatacatagtagattttgacaattaaaatttaattaaatccaaataaaagtctatgaaaatgaattattgttaaattaatataaagaaaataataataaaaaaatttaatagaagagtattaattgaattaagattatcacattatattttggaaaagagtaaattttcagtaaattatcttgacatatatattgaagtaataatataatttaaagtataaaattttaaaaattgaattataacttcaaaaaataaggagggtaatatgaagataacagatatcaaatttgaaaagcttagaattaaattaaaaaaacctgtagtagtttcatttggagtaattgaatatggagaaagtgtaattttaaaaattgaaactgatgaagggtattgtggatttggcgaagcagcacctcttgcagcagttacaggtgaagttttggataatgttctttcagtattgcttatgtttaaaaaagagttaataggcaaagacccactagatattgaaaccatacatacaatcatggatggaattattataggtaatacttctgcaaaagcagctattgacatagctttatatgatattaaaggaaaaattatgaatgcacctctttataaagttcttggaggatttgatagtaaagtccaaacggatattactataagtatagataagccagaaaaaatggcagtagaagctttagaaagagtaaaagaaggttttaggatattgaagcttaaagcaggtataaatcctgaagacgatattgaagctgtaaaattaattagagaagccgttggagagagtataagaattagaattgatgcaaatcaaggatggaacgtaaatagcagtataaatactatcaaaaaattagaagaatttaatgttgatgcaattgaacaagcacttccacattgggatttagatggtactgcttacataagaaataaaagtaatacaaaaattatgatagatgaatcgttacattcaccaatagatgcaattaaggctataaaaaagaatgcagttgatacatttaatattaagctgatgaaatcaagtggaatatatcctgctataaaaatcaacaacatagctgaggcaagtggagtaaattgtatgttaggatgtatgctggaaacgagaattggtataacagcagcagcaaatttaatagcatctaaaaagaacataacagaagctgaccttgatagttttatgttttgtgaagaatcaaaagatatatctggaggatttgtaatggatggagatattatgaatcttgtcaataaaccaggtttaggaatagaagtaaacttatgataaatttggaggttaaatatgaatacacttttttcaaatccaggtagtatacttgctgtaatgacatcaatgattgcattgggtttttacttacaaagatacaaagccattaaaagcttaggaccagcacttacaataatcataatgggaataatactttcaaacttaaaagtagttccagtaagtactgagttatatggaactatttcaacatatgctatcccagtttctatgactataatgttgatgagtgttgacttaaaagaaatgacaaaattatcaagagaacctttaattgcaatttttgtagctgtattaactgtaagtatcatggcatttttatttggattagtatttgcagaaaaaatatcagaaggttggaaggttgctggaatgtttgtaggtacatacactggtggaagtgctaatcttacagctattggaacaggccttaatgtaagtagacaaactcttgctgcagcaaatgcagcagactatgtaattggagtaccaacattgatatttatgtttgctctaccagcaatattaaaaaattcaaagaagtttaaaaaactttggccatatcatgtagaagaaacagaattagaagattgtcaaaatgaagaatttatggagtcaaaagaatggagtattaaagatatagcttggatgttggctataggttttgttgttacagaagtttcaacaatacttgctggatatttcaattcaagttttagtagtgcagcaagaatacttttagttacaacaatttcaattataattgctcaattaaagccagtaaagaaactaaagggaaatttagatttaggattatttgttgcattattctttttatgtacaataggtttttcagtagatataaaagagtttttaggttcaacttttactataacactttactgttttagcataatttttgcttcatttgtttttcatttaggcataactagacttttaaagataaagtatcaatatgtaatactttctatagtaggagcaattgctgatggtcctacttcagctttagtagctgcttctgcaaagtggaattcgcttgtaagtgtagcagtcgtaatgggagtaattggtggagtattaggaaattatgcaggtatatcagtggcatatgcaataaagatgtctctaggattataggggggagtttaattgataaaatttaaattatacatatctggactatacagtggaaatgtaatctttgatggcgatttattaattgaaaagttgaatccttttacaaataaaatagaaagtttaaaaccaataagcaaagaagaaaatacatactatttaaatcttacaaaaatagatttaaagtctttatttaataactttgatgtatatactaaaagcttagtaaacacagataaagacacagttataaataacttaggagaaacgcattctaaacttaatgaatatatatgggttcaaagaaacaaaaagttcccactagatataattattgtagataataaaatagtaggttttatctgtttatccagagaaacttgtactatattaattatggatggatatgaagagtatactgtattaaaagaatgggaaaaaacccataaaaatgaagagatatattctataagatttggtggaaattatatgattgatatgaaagatggtataaaactttctacagatgtatatctccctgattttgtagattctaccaaaaaagcaccaacaattcttatgagaactccatatggaaaagaaaatgataaagaaatatattataaatatgtacaaagaggatatgctgttgtaatacaagatgttaggggaagaaatgaatcagaaggtaagtgggaacctatgattcatgagagggaagatggagatagtaccataaattggatagtatcacaggaatggtcaagtggaatagttggaatgcttggagcatcatatcttggttatgtccaatgggcagctgcatcttcaggcaataagcatcttaaagctttagttagtatagtaacatcaggaagcccttttattgatataccaagaaaaggaggagcttttgtatctggtatgcttgcatgggcatttatggtatcaagaaataaagttgatagaagtaaaatggtaagagatgattgggatgatgttttaaacatacgaccaatagaaaatatacctgttgaagctcttggatatagaattgaatttctggaagaatggttaaagagagtagaaaaagatgagtattgggatttgatggattggcatttacaaaaagataaaataaatgtacctgcattggttgtatctgggtggtatgatgataatagtatgggaactacagaggccttagatgttataaaggactatgaaaaaggaaagagaaaggctattctaggtccatggatgcataattcaaatactttaagagatataaatggtatttctttaggaaatagttcattaagatatgatttggattataattatctattatggtttgataaatacttaaaaggtatagaaaataacatagatacgactgctccagtagagtattactctgtaggttttaataagtggaagacagaagaaaattggccaataataaataagatagataaaagtatgtatctaataagtgatggaaatgctaacacatctttaggaaatggtagattagtatttgataatgatttagaagaaaagtatgatagttatatatataatccaaaagacccatcagtacaactaattgatatgtcagagaatgaagttggagttccaaataactacaaagatttagaaaaaagaagtgatatgttgtgttatacatcagatgcttttagtgaagaatttactgtaacaggtgatataaagttagagttttttgcatcaagttctgccaaagatactgactgggttataaaaattatggacgtggatttagatggaaattcaattaaattagctgatggtatacttagtgctagatttagaaatagtttttataagtcagagtttatggaagaaggagagatttataagtttacgattataacttcaaaaatatcaaacacgtttaaagttggtcataaaattagactagatataacgtctagtgctaaaaactttattttccaaaatagcaacacgaaagagggatataatagtattgaatatatagaagcaaagaatacgatttaccatggaggtaaatatccatctaaattgatattgccaatagaaaataagtaaatttatatagattaaatagtgaggaggtgtctcaaaatgaattttttagttcgtgagacactttcttttatacgaaatcaaatatattttcatcatttcaacaatgaaaaagaggcttatctctctgttttgagatagcctcctataagctaaattgattattttgtagctgcaacaacgctcatttcaactaacaaatgctctctagcaagtctagcttcaacacaagctctagcaggttcaaatcctttttcaacccaagcatcccaaacagagttcatagcttcaaagtctttcatatctcttaaataaatagtaacagatagcaaatgttgcttatctgaaccatatttgtttaataaatcttctattttagctaaaacttcagttgtttgttcaattactcctccttcagcatgagtttgtccacataaataaactgtattgttatgaactacagctctactcattcttccagttccttcatatctctttatttccatattttaaatacctccatagttaagaaatctattaaaaatctaaataataaattaaaaaaagtctatactatataaaattatattatatattctgataataatccataaaaacatataactttttagctataattattattgttattaattgaaaagacttattagttacttgacatagtttacacttttaattatagtataaattggaatatttagataattattatttaatgtataagctaagtttttaattaatatggctttatacatttatatagaaaagaggtacgtatgagtagcacaatcaaatcaaatcgaataaaaggtataatgtttataatagcatcagcgcttggctttgcaatgatgtctgcattcgtaaagctagctggagatttaccaagttttcaaaaagtgttctttagaaatctggtatcagctataatagctttttggcttatcataaaacataaaggaagtctaactggtaaaaaagaaaatttaaaagtacttttatataggtcaatatttggaactctaggagttatatttaactactatgcaattgacaagttgatgctttcagatgctaatatgctaaataaaatgagtcccttccttgtagtaatattttgtgcaattgctctaaaagaaaaaataaatgtaaagcagataggagctattataattgcatttataggagctttattcataataaaaccaacatttagtgtagaagtaattccatatcttgggggaattgcaggagctgtatttgcagcaatggcatatacttgtttaagagttcttggagatagagaagattactatacaattgtatttttcttttcagttttttcattagttactgtagggccaattgcttttgcagtatatgaaccaatgacccttatgcaacttatatatctattactaggtggagtatttgcaagtctaggtcaatttggaataactttagcatataaatatgcacctgctaaggaaatctctatatttgactatagtaatataatcttttcagcaattttaagtatattcttattcaatgtctatccagatatgttaagtgttgttggatatttaatagtattttcggcagcattttatatgtttttatacaataagaagttagataaattagacaaagaaaagaagaagtaaactagataaaagtgtttttataatttgtattgaatatttaagtctttgtattaaaattaaagaaaatttaattaaaaatgtttggtatattaacttataacagcagttaaaattgaaaaattataactgctgtttcttttattaaaaatatccaaatgtctgtaaaaatagactataatagagtagtataaataatataaaggggataaattaaagtatggaaaaagtgaaagttgctgtgattggagcaggtaatagaggaacgtatgcatatgctccatatatttatgaaaattctgatatatgtgaaatagttgctgtagcagaacctaaaaaaggaagacgagaactatttacacaaaaatataacctagatagtaaaaatgtatttgaaactttagaagacttttttaaacatgacaagatggcagatgcagtaataatagctacaaatgatgatagacattatgatgtagcaaaactagctcttgaaaaaggttatcatgtactattagaaaagccaatgtctaatagtttagatggtttggtacatatagatgacttgtgtgataagtataaagataagatttttatgatttgccatgtactgagatattctccattttataataaattaaaagaaattgtagaaagcaaaaaattaggagagctagttagtatacaatataatgaaaatataggatattggcattttgcacatagctttactagagggaattggagaaatagcaatgaaaccagccctttaattttagcaaagagttgtcatgacatggatattttgttatatttagtaggaagtagatgcaaaaaaatatctgcatttggaagcttaaagcatcttaataaccaaaatgctagtggagagatggcacaaaattgtcttcagtgtttagttgaaaaaaaatgtccatattcagcaaagagaatttatttagaaaaagatagaagtataaatagagctgttcacataaatccaactgaagagaatctattaaatatacttaagacaagtccatatggaagatgtgtttacagatgtgataataatgttgtagacaatatggtaaatatattacagtttgaaaatggagtgacggctacttttaatttatgtgcatttactaaagaaaatggaagaactataaagttaatgtttagtcatggtgaagttggtggggatttaaataaaaatgagataagaattaaaaaatttggaaaaaacgaagaaatagttatgaatccatcaaatcaacagaatatggtagaggaatatgatagaaatcttatagctgaatttattaaattagtttcaaataaagaactagaaaagggtagagtagcagcaaaagaagctatacaaagtcatgtaatggcatttgcagcagaatattctagggtcagtgatgaagtagtgtatatagaagaattttttgatagtgctaagcaaatgactaaggagatagaagaaactatattttaattaataaaaatttattaaataaaataaagatagattaaataatagaaatacgaaaatatgtgttctattaaggaatctatcttttttattaaggttttttcttatccctatcaaaaaaatccatacattctgataaaagataagaaagtaaagcgaataagatttctgtacttaaaggaatcgttactgaatccataaaggtatcaattatgttcatagctagaaaagttagtataaaatcaattataaattcgcaaagtttatatattgagtatggtaatttgtttacatatctgaatatatctaaaatagtagtgcatagaaaatcaattggagtggttatacaaaaatatattaaaaagaaaattaatacagctccaagagatttatattcaaatcctaagaatgataagaagccaattcctataaccgtgaaaatacaaaaagttataccaaaaaaaacagcaaaaaataaaaatacagaaataaattcgcctaaaggaatccttcttttattacttatcttaatcaactccttaatttatgatatgaaatttatataaataataacattcttaaaaattcataatagtcctctgtttcaaatagtactgtttgagaatctatttttttcatatttggataaaaagaggccttaaaagctttataatgttctctaaattttatttctatcttaaatttatctggcaattttattaagtgcctagataaatctccagataaagcttttttgacacctttttcaattttttttagtgcaaggtttggatggattgaaattgaaccatttccaattccttttgacacaggaacagtgactatatttggatttagtttttttgcactctcacaaagcatttcatctccacttaaaaatgctacaggaacattataatatgcagcaatataagcatttatagtaaattcagatgctatttcatcatttattttaaaatagtcataatcaatatccatagtatgagaaagtggattaccattacaagtagctccagagtgatagccggtgaatatacatgcatcaaagctttcatcaattccagccatcataactagtgggtctttggtccatcctctaagtattttgacgttttcaggtaaaatatttggattaatatttctaccactgtcatgtgcatctttaacaagtatttcatgtacaccagattgagtagctccatcacatgctgctgttatctctttactcatttgtgttctatagtgttgtgaaaattcacattcaagttttgtttcatcccaatttacaataccacaagtaccttctatatcagcacttaaatacaatttcataatatatacccccttatgtttattattgatgataataacagataacagaaaatacataatcaataaagggcataaaaatattatgtcttactattaattattattaaatctgtaactgaaaaataactaaattggtattaaaaaatataacactatgtgtcatttatttatatagttttttatatctgatgtttatataaaattgtaacatataagtggttacatttactagtttaacatagttaaaatagttaggtattatttttaagttaaattgattattataaaatcgtagaataaaagaaaaatttaatttattaaaatgcatgaaatgttttttcctcaacataatgctaaattaaactcaaaaagaaataatagaaaaatcttatgtagcttagaaagaatgtgaatgatttaagggaaaaatagaaatttattatataatattaggctgtattatgtaatacagcctaatattatatgtatatgtgacataaaatcttggtaagtgtaaataaaataaatgtggaaaacaaattaatgaaatcaagaaaaaagtaatttaaaattcaatttcatcttcccaattaaattctcctgatttttctacactcttaggccagtgactacaccatttaggaacggacggattttcaaccctatcaacgcttggagtatatggctttaagtctataacaggactattatcattagcatcaatatatggtatttttattataccattttcatggtcgatattgataatttgtacagcagtcaatgctattggattgggtcttataggtgaccttgttgcaaatattcctataacgtttggtccacttttataaggttttggggtttctaaaatacttcttagttcaggattatcaaacccatcagcccaccaaaatacatttaaatgactgaaatcgtcgagttcatttaatgcaggtacatactttttgtctaatttaataaagacctcttcgccttgaatacatattttacctataggatttattaatatttctttcataatattacctccaactatttaatttatcatttgtaattttagggtataacatgacatcatgtgagggtcaatataaaataataaataaaaatattaatagttagaatgataatacattttttacatggagcatgacaccagtaataaggcaatcttcgtcaatatcaaaagtagaggtatgcaaaggggaagtaatgtttttttcacgatttgcacaaccaaggtggtaaaaagctccttcacagtgtcttagaaaatacgaaaagtcttcagccccaagagtgggcgagtctttaaggataatattttcttctccaaacaattctacagcattttgcttgacgtaatctactagatggtttgaattgataagagctggataaccttcctcaatttcaacagaaatacttcctccaaatgttttacaagtaaaatcgcaaatttctctaattcgtttttttgaaaactctctagtttcaggagtcaaggttctcaaagtaccccttataaccactttgtcacaaactatattttccttgattccaccttcaatctttcctagagaaataaccacagaatcagttggatttgtgtttcgactaacgattgtctgtagagctgtaataatatgagcagatataacaatagcatcaataccttgatgtggataagctccatgacattttgaaccatgtacagttaattgaagtgtatcggtggaagcatttagagtgttgtattttaattcaattagatttttgttgatattgggatttacatggagtccaaatatatattttacatttgggttttcaagacatccatcttctatcataagttgagccccaccaatagtttcctcggcaggttgaaaaaagaattttacatttacatttaagtaattctttaatttaaatagtatattacaagtacccagtaaaatagcagtgtgtgcatcatgaccacatgcatgcattttaccaatattaatagatttataagaataattaagttcttctgttataggtaaggcatctatatcagctcttatagcaactgtttcaaagtttggactcacgttaatgtatgcagttatccctgtatgattcttatattcaatataatttatacctatttcatttaagtatttaataatttttttcttagtttgaaattcttctaatccaagttctggagtcttatgtaaatctcttcttatatttataatccaatcatttatctcatgacaaagagttcttatattaagcataaaacacatcctaactatattaaaaatttatttttcttcattaattatattattttatgtaaatcattattatgtatcaagtacaaataaaatatcttataattatattagagatatttagtatggagaagaatatatcattttataagaagaggtgtttaaatgttaggaataattgcgccatctgggccattaagaaatacaagtttggaggaaataaagtttaatttagaaagttatggttacgaagttaagttttctgaaagttgtagtttaaattataaaggttatttagctggtaatgatgatattagagcaagggatatagaagatatgtttttagataaagatgtagatataattatgtgcttaagaggaggttatggaacaacaagaatattggataaaataaattatgatataataaagcaaaatccaaaaccatttataggtttttctgatataacaggtttaaatttagctttttataaaaattgtggacttttaccatatcatggaataatggcagcaaatgtaggtaaatgggataaatttacctataaatcattggtaaatgctttagaatttaaagatgacttatatttagaaaatccaaaagaagaaaagatttatactgtatgtgaaggtaaagcagagggaataataatgggaggaaatttatccttaataattgccacaatgggaacaaaatatgaaatagatgcaaaagataaaattttgtttattgaggaaattggagaacctcaatataaactggatagaatgttaacacaactatattcttcaggaaaacttgaggaatgtaatggtataatttttggagattttaaggattgtattgaagaaaatgatttgatggaattactaatagaatttgcaaataaggtcaataaaccttctatatataatcttcagtcaggacattgtatcccaatgataactattcctttgggcagaatgtgcgaattagatgctacagaaaaaatcgttaaattaaaaaaatagtgtgtatataaatataatagaaatatggtataatcttatacaagtaaaaatttagctaggaggatgaaaaatgtctgatgatagaataatagactttaacgaactaaagaacaaagttaaagattctgatgtagataaatttgagcaatacatatataacttatatttttctgttatggatggaaagatgtccatggctgagttttcaagaaaaatattcgattatatgagagataacaacatatctcaagaaaaatttatgaaaatacaaaagcaatttatggagagatatggtatggacactgaagaagtagaaaaacaacttagaaactttggaatcgacccttctacagcaggttttatgagtaataatacttccagcaaagtatctacagaagatttagagtcatttaagaagagtgcaggattttatgagaaatatggagaaaaaatccaaccaaagagttgtataacaacatttataaaaaatgacttaaatgatattaatgtaataatcgaccaagaaaagataatgctttgtagtgatagaaaaataaatcttatggattcagaactaaatgagtttttattagaatataagaatatgtttaataaaaaaataaaggtagtaatgtgcgaaactacgaataagtatgattattaaaaaatgaatttaaatactgaagtagtatcaattaattgtactacttaaaaataaaaatcgcaatttattattccttataaatttgtataaggaatatctaaactgcgattttttatattgtgaagattagtcataatagatagtgttttaaattgtaatcttctcactaaaactgtgtttttctattagaaattttattaaaaataaatatctgataattgtattatatgggatgtaaagtattagaggcttaacgaatctcttttaatacattaactccattttgaatcatactgttgaaaaatactaagtttaaaatctcagcagggtgaatgttaggaatatcataagtatctactaaattcataggtacaactatatttttttcaatattatgttgattaaaatatgattttagagttattgcaaattgatatatgcatatatctgtgcaatcgccaactataattatattatctatattatcaaaatccaaattttctaatgcaaaaaatccattagtagaatttttaggaagaatttgtaggttttctatcgacttaagttcatcaaccaattcactttctacatcattttccaaacagtgaacaggataactcaaaagttctattgatttaggagtatgagaatcagtaaatgctattactctatttaatttgtttgatattttttttgtaaacatttcaattggttttattaaagactctactctaggagagtataatgcaccttgtcttgcaaagccattattaacatcaattataaataaagcagttttactcaaatcataattttctattttttctattggtagattatctaaattactctttaaagcttcaagttcatttaataagttatccatagttatacctccaagataaatttaataaaattgtacatattaattatataaaagtcaaggagtacaaactattgtataattagctgtattgttttgagtgtaaaagatttgaagcaatatctggatagttagtaaaaataccatctacattgagttttagacagtgtagtatatcatcctcttcatttacagtatatacattgacaccaagtagatttttgtgacaaagttcaattagagattcatttactaaaactagaggtggatgaaggtaactattacccagaaatttagcaaaattgactacattgtttataggtaaataacacaataatcctgtttttacactagggtctaatttatgaaagttttttaagctattgctgttgaaactagatataagaactctatttttcatattatactttaaaataagctctaaaacgtctttttctatattgggatagtttattttgtcagtttttagttctatatttaaaataaggtctgtaggtgaaattagaattaatacttcttctaaagttggaattttacattctttattgttttgatatccttcaaaagatgagtttagagtttttaattttcttaaagtaaagtcttttacaaaaccatgtccattaaaagttctatcaaccttttcatcatgaataactacaatttttccatccttagttctgtggacatcaagttctattccatatatatccatatacaaacattttttaaaagctagaatagtattttctggatactttccactaaaccccctatgagcataaatattcatttatatggttccctcctataagtataacttatcttataaaaatttaattaatataatatatcatattccaaaaggtattgttatatattagttaaataactatttgtaatttatatattatataaatgtagaaaaataaaatcatatatgtgttataatatattttaaacattgtaaatattacgaatttagtagtcataataagtgtaattttatgcaagctcatgtttttagagcttgcatatgtattattaatatatttatatattgtgaaaataaaattccaaaagaattttttctatagacttagtagtaagggggaattttgatatgtatgaagttaatttagaacgagctatgaattattggatggatttgttagatgattatacgaatatagcaaaaattccaaatgattttttttataaagattgttctgatgaagtagtagatgaggtttttaagatgaatattgagaaacatgaaaggttaattcaatattctaaagtgaacaatattagcatagactctatcatagaaactatatatggccttatacttcaaaagtatatatatgaagatgatgtagtttttggtaaaacaatgaatataattccaataagagtaagagttagacaaagtgaaaaatttatagatgttgtaaggaagctaaaaaggcagtggagcaggtctttagagtatggatactatttgttatcagatatagagaataaaaatcatctaaatactaagcttataaacacaatatttatagctaaaagttttgatttatcatatgattatgacatagaaaaaaaaggatatgatttatctgtaatagtatatactaagagggcacttaaaataaaaataaagtataaaccatctatatataaaagagaaactattagaagaattttaaatcaatttgattatataatagagcaaataatagaagataatgatattttaatagaagatttagaatttgtatgtaaggaagaagaaaaagtattattggaagactttaataataatcaatatgaagtaccctatgataaaagttatgttgatttatttagggagcaagttaaggtaacacctagtaatatagctgctagggatgaaaatagaaagttaacatataaagaattggatgaggtaactgataaacttgcaggttatttaaatcatataggagtggaaagtgaagacatagtagctgtaatgttaccaagagatattaacataattattacagcaatagggattatgaaatcagggggagcattttttccaatagacacgagtaatccagaagaaagattgaattaccttcttgaagatagtaatgcaaaagtagtgataactacagatgaactcaaaagtaaggttgtaaatgagaataccatagtactcgatataaatgatgaagaaatgtttaagcttggatatgaattaactgaaaaaataacatcatcaaattgtgcatatacgatatctacttcagggtcaactggtaggccaaagaccatagctatagaacataagagtttagtaaatatgtgttattatagcgtaaaatctataagcgctacagaaaatgatatatgtggtatatacttaagtttcagttttgatgctgtaatgaaacaactattcccttatttgcttgtaggtgcatcaatagatattatgcctgaagaagctaaatttgatgaatatacagtaaatgaatactgtgaggaaaatgacataactatactagcattgccaacagcatttgcaaggttatttatacaaaattgcaataataattcacttagagttgtacagactggaggagaaagattaaaaggatatagaaagcgtaattatgaactatataatgagtatggaccaaccgaatttactgttgtatcgacttcttttcatgtggacagagaatatggaaaaataccaataggaaaacctatatttaatacttatgcatatgtattagataaaaagaacaaactatgtccaattggagcaccaggagagctatgtctatcaggcattcaaatatcaagaggatatttaaataaaaaagggctaacagagcaagtatttgtagagaatccttacaaaacttgtgaatataataagttaatgtatagaactggtgatttagtaagatggttagatgatggaaatttagattatattggaaggatggacaatcaagtaaaaattgatgagtttaggatagagctatatgagattgaaaatataataaataatattacagaaattaaaagtgttgtttgtatatcgagaacaaatgatgacggggatatgtatatatgtgcatattatgtaattgatgaggaagatagtggtaagataaatgaaagaaccattagagaatatttaaatgagcatctacctccatatatgattccaacaataataatgaggatagataaaataccagttacaccaataggaaaagtaaataaaaaagcactaccagagtgattttttattatgacaggtgttgtaaagtgattccatacatttctttatgacacctatttttctgaggaaatcaattgatgtaaaaaaaagaattttctgtatatatttactatggtgaaaatttatttataagaatgattattgtattttttatacttttccgtgttttaaagcattttttttacaaaattaattttacattaaaaattttttttattttatatcttaatagtttttagtagaattgaaaaataaaaagaaaattagcataaaaatatctaaaagtagaaattaataatatagggttaaattttagtagttttgactcgctatttgtaaaataataaaaagttaagttttatatgtatatatgttataatatatacaaattgaaaaggggtgaaaattttatgaacaaaaaattacctaagggtgcttatggtgaggttagtggaaaagattacgttccatatatcacagataagtccagaaccggtggaaatgtagctgtactgattatcggtattattttagctgccatttttgccgcatctacaacttactctggaatgaaagccggtcttacagttgctgcaggtattccaggagctataataggttctgcttttgttggagcatttgctcgttcaaagggtattcttggtaaaaacttaatccaagggatgtcaagtggtggagaatctgttgcaagtggatttattttcgtattaccagcagttatattaattggaagccaaattacattctttgaaggcctagctgttggagttggtggagttttatttggtataggaattgctgctatagttcacaactatctaatagttgaagaacatggtaaacttatgtatccagaatcaatggctatatctgagacacttgttgcttcagaggctggtggagattcaattaagtacatgggaattggatttgtaataagtggatttattactgtattaactggttcattcttaaatgtagcaaacaatgtaatgagtcttgtaggaagcaaattctacaaatggaaatttgatattgaagtaaatcctctacttttaggaattggatttatagtagggcttgaagtttctttaacaatgtttgcaggaagtattttatcaaactttggtatagcacctttaataggatactttacagatatggctaaagatggagctatggtatggaataatcctgcaatgcctcttaaccaaatggatgtcggagcaatatctagtagttatgtaaaatatataggtgctggtatgatgctttgtggaggtattattggtgcaataaaacttataccaactataatcgcttctataaaagaaacacttaaagctaaatcaagtgctggagaaggagaagaaggttcatctatacaaatgatacttttattaggtggagtagttattggatttttagcagcattcttaatttctggtaacattgttatggcaattattggagctatcatatctcttttattatctttattatttgtcatagtagctggtcgtttaacaggaacaattggaacatcaaatcttccagtttctggtatgactatagcttctctagttattgtaacattagtgtttgttataatgggatggactgatttagaagctaataaatcattacttttatttggttcatttatagttgttgctattgctatagctggaggttatactcaatctcaaaaagtaacttatattattggtggtagcaaaaacgaaatgcaacgttactttacaattgcaagtatagttggtgttatagttgttgtaggagtaattttattactttctgaccaacttagagcaactggtgataatgtacaatttgcattaccacaagcaaacttaatgtcaacattaacttctggtattatgtcaggtagtttaccttgggttatgattattgttggagtatttatggcaatagttctatatgcattaaatttaccaataatgactatagctataggattctatttaccaattgcaacaacttctataatattagttggagcattaattcgtttatttgttgaattagtatctaaaactgaaaaagaaaaagaagttaaagtttctaatggtataagtttatcttctggtcttgttgctggtggttctatcattggtttaataggtataatattacaagtaactggagttgtaactccaaaggtaccaagtggatttgctgcaacaaattcaatggcaattgctttattagtagttttagttgtgcttacaacattacctattgttttatctaaagtaaaaaataatgagcaagagtaatgatgttttagatattgtatttaaaattactgatggacttgaatatgaagtagctgaaaatagtgttgttactatacttgaaaaacaggaccataaaattcaaaagttttttagaaagttaaaagctagaatacctaaatacaaaaaaatagaactagatgaatattccagttttgtttttttacaaattgatggtcaaaggactgttagagaaataggcaagaacctagaagctaaatatggagaagaatctcatccactttatgaaaggttgttagtatttttaaatcatattgaagttaattgtcactatattgaaagactggatatatagatataataagaattattatagatatattaaagcatataaattagaaggtaattatgaaagaggctgtctcaaaatagagataagcctcttttgtattgttgaaatgatgaaaacatatttgatttctcataaaaaagagtgtctcataaaactaaaaagttcattttgagacactacctttaaaatatttataaagtatagatttaaagcaaaacttattaaacttaagattattttaatatcacttattattagctatttcatcagctagattatttaaatattcccatctttcatatttgtattcaagttccttttctagtttagatttctcatctaaaatttcttgaagtttagtaaaatcagttgaaaattttgcagtactttcatcaagtgttgcaattttagattcgagtttttctatatcagagtcaatattttcaaactccctttgttcattatatgagaacttaagctttttatcatttttaggtttttctttttttagggtagtagagtcatcttttttaactgattcccttttagattcttcaaattcaattccttgaatctctctataaataagataatcactgtaattacctgtatagatatgaatttttccattaccttcatatgcaaatattttattacaaattctatctaagaaatatctatcatgtgatactgtaactactacacctttaaattcgtctaggtattcttctaatattttaagcgtttcaatatctaaatcatttgtaggttcatctaaaagaagcacattaggagctgtcataaggattttaagaagatgtagtcttcttctttcaccaccagataatttacctatcaaagtatattgcatagtaccattaaaaaggaatctttcacacatttgagaagctgtaatcctagtaccatctgaagtttctatatagtcactagcttcttttacatagtctatagccctcatatcaatattcatatgagagtcgtcttgagaaaaacaacctattttaactgtttctccaattgaaatatatccactatcaggctctatttctccattaagtatatttataagggtagatttacccataccatttttgcctattataccaattctatctgtacgagttaaagtgtattctaaattatctataacagtattttcttcaaatgatttagatatattgtgtatttctattattttatttccaagtctacttgatgcaacagatatatcgagattttcatcaggtttaaaagaatctctattcataagttcatcaaatctttgtaaacgagctttttgtttagtgctacgagcctgagctcctcgttttacccacgcaagctctgttcttattaaattttgtcttttatcttcaatacttgcttctagcgaaagtctttccattttcttttccaaaaatattgaataattcccatcataactgaataatctacccttgtccagttcaataattctatttgtaacacggtctaaaaagtatctatcatgagttatcataagcaatgagccttttcttgaattaagatattcctcaagccaatctatagtatcattgtctagatggtttgtaggctcatctagtatcaaaaactcacaaggtgtaataagggctgatgccagagagactctctttctttgcccaccagaaagttctgctattttttgattaaagtcatttataccaagctttgtaagtactgacttagcttcactttctaaatcccaaagatttaaggcatctattttttcgtgtactgataataattttttatttaattcctctgtaaagtttgaattaagtttttctaggatttcttgatattcaccaagtagctttaattcttcagaagttccattaaatacttgttcaagtacagttgaattttcattgtaagttggattttgaggtagatattctatcctaataccattagtttttgttatattaccagtctcactttcttcaactcctgcaataattttgagtaaggtagatttaccagtaccatttacaccaataagtcctattttttccccctcatttattccaagagatatattttctagtaattttttttcagaatagcttttacttatattttccaatgtcattaaattcatataattcacctttatttctaatctattatttttcaaaatgttgataatctgggtttttccaatagccaccccaactccaacctctgcttacaaaagcattataacaatcatcacctttttttatcattccaaattttgtgctagacctatcagcataaactgtacttattttaggtgtaacatcatttccagaaacttgaggattctgtaatgggtttatatctatagcacgtcctttaccatgatttgaaactacatttgtaccagctatagttctataacaaaatgatgaggtattattatcagacatagatttttcatctacagcatcatagtcatctattaatttaattttttcaattggatattttttttcgtataattccttaaaaatatccactacttctggagctagttcactgtttactatcatttctccttgatgagttttttcatcaaatccataatatgtaagttttaaataagatagactatcaaagcttataggttcatcagtaggcatagatttaccaatcattttattttttatattatctggtattgaagaatatgaaaaagtaggcttgatattattatcttcctgctttttggtagagctttgattatttttagaatcatctgttgtattatttttattctgcatagtttcttgactctttatattaccttttttgttgggattagagaacagtatctcatatatagataataaagcaagaaataatacagttattacaatcgttaattttaatttattaatttttcttcgttttgactttttactcatattatcccccagtattagattcatataaactatatatattatacctcataaaaataaactaggctaacaatatttagttaacctagaacatttcatttatagtttctccaattatttttattccaatttcaatgtcttcaaaagacaacctagaaaatccgagtcttaaagtatcaaaaccagagttatctgtaaaaaataaatctccaggcataaatataacatttttttcataacatttttctaataaaactctagtatctatattttttagttttataaatatatgcaaacctccatcacccaagatatattctgtttttatatatttttttatacatttatatgcaaagttaaatttgtccccatagaatttacgtatttttttaatgtatttttcaaaacctccattacttaaataatcaaataaaattccttggtctaaaaaggatacatgtatgtttctgcacctttttacactttctagtttattgattacttttttatctgcaaatatccatccaattctcattccaggaaataaaatttttgaaaaactaccaatatatacgaccccattattcatattatctagggaacagataggaaatatatgagaactattgtagagtaattcttcattaaatccatcttctataattgctatattgtattttttcataagattatagaatttgtacctattttcaggagtcattacaattcctgtaggattgtgataagagggtgtaatgtatgcaaactttattttatttttatacttaactaaattgtcttctagcatattgaagtccaaaccatcttcatttatatctacacctaagatattgaggttatgagatttcataatttttatagcagtattatgagtaggattttcacatattatgtagtctttttcttgggtaaaagatgacataataatatcaaagccttctgtgaatccatttgttattagtatatctttattacttatatcagcacccttgtttgtcatatattctagtaaatagtcaataaggggcttataaccttgtgcatatccatagttgagtaatttatgtccttctagtgaaattctatttaaaaaggatttttttaattcttccatgtcgaataaatctccatctggagaaatacttttaaaggaaatcaggtcagagctccaaggaatttcactttttataatgtccaattcattggcttttttagagtatgtattctctaaacaatcccagtttaatgaccatgtagtatttgaagacttattctttgatttaacaaatgtaccttttcctgaaatagagtagattaatccttctgattttaattcttcataagttaaaactacagaatttcggctaacttgtaaaagctgactaagctcccttgtagaagggagcttactattgtctggaattagtccttttgatatcatatcacttatataatttttaagttgtatataaattggttcattatcatttagttttagatttgaaaatatcaaattaccacctcaaattatttcatctaatttaaagagtattctataagtttatctaatagttcactgtacttaatacctctagcagcagcacttctaggaattaaactagtttgagtcattccaggaagagtatttagttcaagaacatatggaataccttcacttataatcatatcaactcttacatatgctttgcaattaaaaattttccaacaagtctcagaaatttcgtttactcttttttgaagttcttcatctaagtaaacaacttcttcctttgcacctttttcaactgagtatttagcttcataatcaaagaatcctgaatcagattttatagatattgtagggaacacttctccatttaatatgaatgaagtatattctccacctggtatatatttttcaatcattacaaattcgtcaacttccagaccttttctaactgcttcttcaacttcatccttagaatgaataaagaatgtggctacacttgaacctcctgagtttggttttataaatactggataacctatattatctatttcatcatagtcgatttcatcaactgattttactaaaacccatggagcagtaggtaggtttgaatctctaagcatttttttagttatatttttatccatacacatcccactgcaaagaggtccacatccagagtatggtatatccatagtctcaagtattgattgaatacatccatcttcaccaaattttccatgtaaagcaagtattgcaaaatctatatcttctggtatctttgtaaatatatcttttttatcatctattattacttttacaacttcatatttatttttatcaaggttattatatatctcttttcctgaatttaaagaaacttctctctctgatgatattccacccattataactgctattttcatattatacactcctattttaatttttattattttaaagtaaactttttatttacatacttaattatatgaattaacagttgaggatgaaagtaccactatatacgaagtttatattatgtgtggttttagaataataatctagtttaaagatatgtttaaatgattttttaactttatttatgttattatttttgctaaaattattgttatgaacttaagactagtcttaatggctataaatcaaggagtgataaattttgaaagctgaaataataagtgtaggaacagaaatattattgggagatatagtaaatacaaattctcaatttttagctaaagaacttgcatcattgggaatagaagtataccatcagagtactgttggagataacaaacaaagacttttagaatgttttgatgaaagcttaaagagaagtgattttgtaattactacaggtggtcttgggccaactggtgatgatatgacaaaagaaactgctgcagaatactttggtcagaaattagaactacataaaccttcactagaggttttggaatctttctttgttaaaacaggaaaaaaaatggccgaaaataatatgaaacaagtgtactttccaaaagatgctatagtactaaaaaataataatggtacagctccaggggcaattttaaaaaaagatggtaaatttataatagtattgcctggacctccaagagaaatgaaagctatgtttaatgagagtgtcaaaccttacttacaacaattcacaaatgaaatgctagtatctaagactttaagattatatggaataggtgagtcaaatctagaattagaaattctcgatataattaatgagcagactaatccaacagttgctttatatgcaaaagaattagaagttacaataagaataactgcaaaggctgaaaatgaaagagaagcttttaaattaataaaaccagtagaagaaaaaataaaaagtagagttggtaaatatgtatatactgaaggagatatttccatatctgaaggggagactgctttagaagatgctgtttctaagttacttgtagaaaaaaatctaacaatagcagtggctgaatcttgtactggaggtttggtttcttcatctcttataaactatccaggaatatcttctgtatttcttgaaggatgtgtaacatattctaatgattctaaaatgaaaagattaggagtaaaaagagaaactttggaagagtttggagcagtaagtgagcaaacagctatagaaatggctgagggcgttgctaaaggacttaaagctaatataggtatatccacaactggagtagctggacctggtggaggaaccaaagagaagcctgtgggactagtttatactgcaatatatataaatggaaaaacaatagtaaagaaaaatatatttaatggggatagaagaaagataagattaagagctactagagatttacttaatgaattgagaatacaattagaaaagctttaagttgttatgatattggatatatttgaagtgttactataatataaaattgtttttggaggcttttaatttatgataaaacatatattttgtgatttagatggaactctatatgaaaatggaaccataacaaaagaagatatagtagcaattgaagaaatagaaaaaaagggagtacagtttaatgttgctacaggtagaatttttaaacaagcacataatattatcaaagatagtttagatatgaatggatattatgtatgtgaaaatggttcatttatatatgataaagattataatgtaatttttaaaagaacgatagatgataatttagtaaaaaaagtcattgatagatttgaatcaagtgatgcacaactttattttaaatataagggtgatgtaattgtgggtagtgataccactgcttttagacattattctagtgactttatagttgacccagattttgaaaaaagaagtagttttgataatcttataggaaatataggcgtatgttctgaaaatttggaagagttatccagaatagaactttatctaaaaagtgagtttagtgaagtattagaaatatatttttctggaacatatactttaaatatagttcctaaaagtgtgtcaaaaagaggaagtatagagcatgtaataaaaacgttaaatgtaagtccagatgaagttgctactattggggattctccaaatgatatttgcatgttagaaggatttaaatatagttttgcaatgtctaaggcaagggaagatgtaaagcaaagtgcaaattatgtagtagatagtgtaaaaagtgccatagatgttataatggagataaatagttagtataaaaaatgactgtcctagagaagtataaaattatattctatagagcagtcattttaattatattcaattataagtttatataaatttaaaaattcttaagttaaccgcaatttgctatatgatatgattttattgtattagataaaatagagtcaagtatataatttatgacactattacaagtataagctgaaaattttaaatcattcatataatcagttttctttttgtaatcactataaagtttagtaaaaaacttctcaaaactactatttatagtaccacatttaattttagataaatcaacatcttttgcaaatgctccaagttctctttcataagtaacatgtttatttaagctatgcttaaattcccaacgttcactgtgagctacacagaaaaaatcacataaaaaatgacatatgactcctagttcctgactaagtctacttactgaaaagtatttagaaagactatctatattaagactgcatagatagtttattttagaaacaatcatattaaatgactcatctaaataatgtttttttaatttatatttagaaaaagcatcaggctttatattgccatatataaaatttttttcgcttataaagaatgttttattttcatctatattatcaagtattgattttgccataataaaatgggtattcattaacatatttacacctcgtatagtttattagacttattaaatatattattatgatatgatatttatgataaaagtttaatggtaaatatatgaaactaagtcaacagtatttatttaaataatttcaaccatattcataataacagtaaatggccaaatttacaatatgtaaatagtgttaagtttttatttatcaaatttaaaattaagtattagtatactttctaattaacctattggctttagactgtgagatttcaaggtgtttggctactttataagaactaccaaatttttcataagcatccaaaattatatttttttcatactctttaattaaggtgtcaaaatttttatttttataattagtagattttgagtcagatataataaccttattaatttgggatatatgtgttttatttccattattggtaatatgtatattttttgtaagaatgtttggtaagtcatctattgttatatgattatctgtacaagtaagcaagattttttgaattatattttgtaattctcttatattgcctgggaatctataatttgcaatagcatccatagcttctttagaaatagttttatttaggttgaagtcacttgagtacctattaaaataatattttataatttccactagattatcccttctttctctaagaggaggcaattttatttctataacatttaatctatagtataaatcttctctaaactttttttcttttacttttgaaactaaatcagcatttgtagcagatataattcttatatcaacctttttattttttaagctcccaactggagtaaaagttctatcctgtattaattgcaaaaattttgcctgtagattttgtggtatatctcctatttcatctaaaaaaagagttcctccattagctaattctacgagcccaactttacctttagtacttgcacctgtaaaagcacctgaagtatatccaaaaagttcagattcaagaagttgtggagatatagttgcacaatttattgttataaatgggccattagatctattgctgttgtggtgtatatatctagcaagtgagctttttcctgttccagattcacccaataaaagtacacttacatccgttttagaaacatgatttactgtgtttatgattggtctcatcactattccgtccataattacagtatcttcaattctaagtgcagttctgtatagtgtttctacctcagatttatatttttttacttgcttttttgtgtcttcaagtttattttttatattattaagttcagttatatctctacaattttcaacagtaaattctaagtttccattttcatcaaatataggggtagcagttatgataagctttttccctgtttgagtatcttgttccagtgaaaatttagtctttgtttttaatacaattggtatggggctttttgttgaatatccagagtcttctaaaaaagaaacattttttcctaaaatatcttctttttttagaccataattttcttcaaatgctttattacaatatattattattcctttatcatcagaaacacatatttcatcatgggaagcttctaatattttttgataaaattccaaatctaaattcatttttatattttcctcctaaatttttaatgatatattaaaataggtttaattgattaatatacttaaaatttgatatttatataagtttcagtctattttaactttaaataagttatatataactcattttacaattaaaataagtctaaatcaacttaaagtaagcgaaaaataaatataagaaaattgaaaacttattagtattattggaaagactagggttttagagtcgatatatattggtttaagatggcataatttttgcttaaaaagaagagtgtaaattgactaaataaaaatagaagggaatttaaaatgggagaaaaaagtaaagggtatgtatttatagcaatagcagggttattatgggctacacttggattatttggaaagtttttaatgggaaatggactgacatcagaacaagtagcatttacaagattgttttttggatttatagttttaggcgtatattcatctataaggacaccacaaatcttaaagataagcaaaaaaggaattatatattcagtaataataggaattatatgtcaggcaatgtttaatttatgttattttaaagcaattgacattgcaggtgtatcaattgcagcagttttactatatacatcaccactgtttttagcaatattttcaaaagtatgttataaagaaaatattactagaagcaaattattttcacttattctttgttttattggtgcaattatggcagtgactggtggacgtttggattttcaaggtttaaacgcttttggacttttacttggggtattatcagcaatagcatatgcacttatgccaactattagtaaaaatgctttaaaggaattttcaagttcaacaatattagtatacagtttcttatttggagctatatttatgattccttcttcgagaccttgggaaatcttaaattatgctaaggatttagatgttttatcttgtatgctaatgttaggcattgttccagctgcacttgcatatattttttatgcagcaggtatatctaaaggtgtagagttgtcagttgcaggtgttgtggcatcagtagagttagttggttcagtaataattggttgcactatattaggagaaagtttttccttagggaagttatttggagtgatgttgatgttaatatctgcagtagtagcacttaatctttcttatgatgaaataagaatattttataaatccaacaagttaaagcagattgaaaaaactgaaagtatttagaattatatacttaaaaaggatttattggtatacattttagaatccaacaaaaattataccaaattatatttggtattaaaaaataactatttataaattttatagaataaagtggacagtacaaataaaatataagtagatacagtttagactatctattttttattatatattgtataaatgtacaaattaatattttgttttgtaaatactaaataactatagaaaggactatatttatataaccatttctatagttattattttgtattaaacaaacttacagccctgataagaatttctagcctttaaagtatcatcaatttgatttaaaatttcccatttttttaggctccatataggacctactagttcatccctcttaccatcaccagtgagtctatggattatcatagtttcaggaagtatttctaattggtcacagacaagattgatatattcatcttgttccataagagttaacataccattttgtaacatcttttccataggagtatcttttataacatgcaatagatggatttttataccgtctacacccattttaccaactgcctttgctgtttccatcatcatattataatcttcaccaggaagaccatttataatgtgtacgacaacctttatatttttagactttaatttttcaacaccttcaacaaatgttttataatcatgacctctatttataattttagatgtagaatcatgaattgtttgaagtccaagttcaacccataaattggttcttttatttagttcagataagtattctacaacatcatctggcaaacagtcaggtcttgtggatattgaaagacctatgacatcttcaagttctaatatagtctcatatttttcttttaaaacttcaagaggagcatacgtatttgtataggcttgaaagtagccaatatactttgcatgaggccatttttttaacatcatttcttttatattataaaattgactgataagattatctttagggtttccagcaaaatcacctgagccttctttgctacagtaggtacatccgccataaccaagacttccatcaatgtttgggcaggtaaatcctgcatttatagataccttaaaaactttttctccaaaagtatttctaagatagtaattccaagtatgatatcttttatcatcaaaagcatatttaaatttatccaaaaaaatcacctatttctaataaaattgtacgctgagcttgtacaaaaaacatattaccacaaatagataacttaaacaaattctattttaagtaatataaaaatacagcgagaaaataattaatattttctcgctgtatttccagagaaaaatagaactagtccaaataatattatgaaaaaagacattatcgatactataaatctagataaaaaaagtggagataatataaggcatataccaaatagaatcttaactatattccaagttgtaaatttagaataaggattattcttactatttacaagtgctactagttgattaaagattaaataaaaccctaaaaataatgaaaatatgctttgtattttttgaggaaatacaaaaagtaatatacatgcaattattagaacccattggatattaatagagggtttaatttcttctttagtagcatatctttttagttcattaatattttttaaatttaaatatgcaaagaataaaagtgcaataccaaaagtccaagaaattaattttatacctaatgtcttaaatgtaaggcataataatcctaagataatgagcaatactcccattaacataaatttagtagcattttcttttttattaaagttattaaaatcgatattaaaatttgtgtacataaaatcacctccaaaatcgatagaacaattataacagaaattcatatccaaataaagcctagtgtataaaaattaaactatacttagtaattaattaataggttgtatcatagacttctattaatagaattatatagaaggaggtttgtccatgacaaaattatgggcaataatatttgcattattagcaggtggttctacagctcttgaagcttttataaatggagaactaggaaaaagtacaacagcattagtggccacctttataagtttaactgtaggagcaatattttttttggcaagtataatagttacaggtgacttaaagtgtctagtatctataaatggttttaattataagttgttattaggaggagtatttggaggtttaataatatattttacagtaaaggcaattccaaatttaggagtatcaaatacacttatattaacacttgtatcccaagttttagttggattttttattgatagcgtaattttgggacaagaaacaatgcatttatacaaatacataggggttatacttttaatattagggacattctttatagtgaattaacaatttaatataatttgctatgcaactcaaaaatttggtataattatgttaataaaacaaagttagatgaaagaggtgttaaaattggctgatgaaaaatttgtaatgtcatttagtggtggtaaggatagtatattagcattaaatcgaatgttgaaaaaaggatataagcctgtggcactcttgacaactataagtgaagaacatggaaagtcatggacacataatttagaatataatatgcttaagcaagtaagtagcaatataggattacctttattagttgctgagtgtggtgtagaaggatatgaagagagctttgagagggctttaataaaagctaaaaacatgggagcaacgatatgtgcatatggagatatagatatagaaagtcatagaaaatgggatactgatagatgtgaagcagttggtatgaaagtagatttaccattatggcaagagagtagagaggatttagtatatgaatttatagacagtggattttgtagtgttgtaacaaaagtaaacttaaagcacttaggagaggaatttttaggaaaaaaattaactagagaacttgtggagaagataaaaaatgctggtgcagacccatgtggagaacatggagagtatcatacatttgtcgtagatggtccaatatttaaaaaacctgtagaatatgaagtaaaaggaactttaataaaagatggctatggatatttagaaataaaataattacataaataaaatacctattatataatcctaatttttgcaaaggtctaatatttgcaagattgtataataggtattttttatttagatattttcatatattgctactcttatcatctaagcaaccttatttagattagagtctaatgtagaaaaattcttttttagaaaaactaatgataaaataagacatataaactcagaaacaatagtagtcatccatattccttgtccaccaaatattagtatcattgaaattagacttaaaacaactattacaagccctctaccaagagatataacagtagaaattgatggtttttctactgatacaaagaatccagaaattattacattaattcctaccaataagaaagatatagagaatattttaaatacacgaactccttcattgaatagcattgtttcttctgggtgtataaataaagagactattggtcctgaaaaagccatacaaattgcaaatacagcaactgatgctattattgtggcttttatccccatttttaataatttttttacattatctatatttcctgcaccataataaaagctagtaagtggttgcataccttgagttatacccatcatagtcataagtactaatgtatttatataatttatgacactataataaataagagcattttctccaatatatttagtaagacttaagttaaaaagtaaaacaactataccacaacttaattcagtagttgaatcaggaaaacctataaatacaatttttctaagtgtcttaaaatcaattctaaattttgaaaaattcaaagtagagttttttcttaaaaaatgtattaagaagaaaatagtagaaaagacttgagacaaaacagttgcaataccagcaccttttacaccccatccaaattcaattacaaacaagtaatcaagtatgatgtttgtaagagcagatattattacaccaacagtagctaatattggaaagccatcagtttttattataacttctaaagaataagacactataaagaatccgttaaaaaatattattattcctaaataatctttaaccataccaattgtagattctgtagctcctaaaaatagtgctaatctatctaaattaaaaaaagttatagctaatataattattgataatataattattgatactaagttaaatgaaaagacttcgttagcagatttaatatcttttttccccagatagattgcaattatggtagatgcaccagttgaaaataatagagaaactgcaaatataaaattaataaaaggcattgatatattgacagcagctaaagccaattctccaactcctttacttacaaatattccatcaaccattgtatatagtgagaaaacccacattgcaactacagatggtgctaggtatttaaaaaatcttttacctagactcatgttttcgtttatagatatttttgtatccatttattatcactccctgtaaatctattataaaattacgaaactattaattaataattttatttctaatataaatgataaactatggtataataccaatgtcaacagcaaatagtatataattataaattttattaaataatagtgattttaagggtcttataaatatatcttatttatatattactgacatttaactgacaaataggaaaaaggtactttaagtgacatttaactgacaaatggaaaaaaagcactttgagtgacatttaattgacataaaactgaacattatttgaatagtattttgcttatattttcagatgtttctttatccatttcatctaataagtgagaatatcgaatatttattcatagctatttttatatctgcatgtactaatattttataaatagcttttatgttagtacctgaaagtaatatcaaagtcgcatttgcatgtattaattcatgtacttttatatctctaggattattatctcttaatagttttttaaaatgaacaacaaaagttggttgaactcacgggttgaatcttttatttaagcatatcaaatcaaattcatttttcaatataccctgtaattttaacttattttgttttaatttttgccctttaagcaaacttataagttcatcaggagcaaataattttcttttggatctagggattttagggtctttgaagattattttattgtatacataaactaatgtttgatttacatgtgagattttttatcaaggtctacatctgaccatataagtgatacagcttcaccaaaacgtaatccaagagttagtatcaaaaaaattggtatacctataggaatattttttgatttttctaataataattgagtttcttgctttgtataaaacttagaagttgaactattttttttgattggggttgtaacaaaatcacaaatattttctgatatttcttttaatctataagattctttcaatactgattttataaaatcgacttggttttttattgaatttaacatgtgctcattgtatatgttatttatataagactgtaaaatagaaggcgttatatctattaatttcatatgttattggaaaatcgaataataataacttggtattcgaaacttttgataaagtaataaaactacatccaaatgcaaaacctgtttttcatagtgatagaggttttcagtatactagtaaggtgtttgaatcgaaacttttagcacaaggtatgatacaaagtatgtcaagagctggtcgttgtattgacaatgctcctatggaaggaatttggggaattttaaaggtggaaatgtactatttaaggaaatttgatacatatgaacaattagttaaaataatagagacttatatatattactataataattttagatatcaaaagagattaaattctatgtctccacttgaatttaggaaatatttaagtacagagatagcataatttattttaagtagctctaaaaaaatttaaatatctagggttttatttgacgtgctcttttttagatagtaaactttaaaatatagatattaattatatgaatataataaaaaaagtactaatgagttacactagtactttataactacttttacatgttttaactgtataaaacagtgggtatagttcagcaggagtgactttagttttgaactaaaaatcaagttcaaaaagaataaacattagtatttgaacttcactctacgtctaaatagattgtagttcttcttgtttttattataccacaaattggtacagatattcaaaaataatatatttatgatataataaaaatgtaaatagttttgcagtgagcgatatttgttacaaagtagggcttaatgcttgaaatataaggtgttgagggtatatgataaactttatcatttgcactactcatggttcactgcaaatttaagagagttgcacatgtgtaagtattgaaaatgcccagtttattttggggtaaagttttatattaactaagtggtatggaaagaggtttttcagaagtatatgtacgtctatattgtaaagttttatattaactaagtggtatgtaaataaggaaggtggaagtcaatatgcatgggtcaaatgggttttatattaactaagtggtatgtaaatacgaaattagagtttgaaatatatgactacataatagttttatattaactaagtggtatgtaaatttgtgtcacatcattgtcacttctttagaatatcaaaagttttatattaactaagtggtatgtaaatttttaagcaggtgattaaatgattaaaaaagtagaaaagttttatattaactaagtggtatgtaaataataacttgtcaatgtagttatatgcaacaacttctatgttttatattaactaagtggtatgtaaatgaattatatattatgaaaaaatatggagtcacagagggttttatattaactaagtggtatgtaaatttgcaggttttccttatagtttgccatatgttcctggttttatattaactaagtggtatgtaaattactttagcactagtaaaggtagaattattaaagtgttttatattaactaagtggtatgtaaattcgaatgtgaatggcacttctatttctccaacttttggttttatattaactaagtggtatgtaaatagtataatgttgaaaagttagagagtacaatcaagaaattttacattaactaaaatgtatagaataaaacatgtatttatacttaaattctgtacctatataaaaaagtgaactctgtcaacaaagcacttttttatatagataaattatcattttattttaagatagaagatactaatgctaaatgtttatcattagtatctgtatgtacataaaagtttaattttttatataaatttgatctttagaaaaatgagcagtatcaataaatatattgtctaaattttttctaggaactagttgactagctataagattagcttcaactctttgattgttagactatgaaattaaatctaaaggttcattcttggtcgtataaatagctttatcattcgtatgtactataacaatttttgccatctgcttttgatagataaagagctttatcagctttagaaaataaatctttatataatttagttgaatcatcagtgaaggcaataccaatacttaatgttattttatgattgtcctttacttttattttacttgcatcatttaaaatatcattagtaatttttattattaaatcctttgttaatgattttataaatattgtaaattcatctccaccaattcgagcaactatgtctttatcatgtgtgttatgtaatagtatttttgatacagcaactaaaacttcatttccctctaaatgcccaaaagtatcatttacagttttaaaatcatcaatatcaataactaatagagcatcattatttttggaatcagaactacatagatactcttcaataagattttgtgatactctttgattatataattgtgttagtgggtcacgttgagcctgattaattaagctttctaatttagatttatcttcagttatgtcttttaaaacgcctattgttttgatagggttatggtcactatcatatataactgaacattgaacacgaatccatctccattcatttttagttaatgaatttacttgtcttatctcaattgtttcacgaagatttccatgaagtacttctagtagttttccaatatcatcaaggtgaataattttaccagattctaatagtttggagtaattttttgtttcaaaattttctaattcaatttttttgtcaatttctacacgttgatattttataagggtatcgttttcaatatcatactcaaacatgatatctgtaatattttgcaaagcaatacgatatcgctctctttctaattttagttcagattctatgttttttagttgggttatgtcagtaataatactattaatttttactatgccatcactatttaacgatttcattccagaatctaatacccacattaatgttccatctttttttcggattctatattcagatgaatatgtaggtccttttgcaaaacatcgttcacaatcttctagtgctttaggtaagtctggtggatatacagcacccactgctgaaccaccactcatttccatgaactcatcatatgtgtatcctaatattttgggcaatccctcattgacatagaaaaatgagtatgtactatcatcattgctaccttttaagccaccattgatattatttgtaatcatttcaataacttctgttttttcctttagtaatctttgcaaataatcataactttgagttccaattttagtgggaaagtattcatcaagttgcatttcaccataagggtttgatatgtgcatgtgctttactaataattttcctctatcctcaattatctcaaatgtacaacgttgatttacctctaaaatcatttgagcattttctttagttcgaacagtatatcttcctaataccatacatctattctcatcttcacttacagtttcaaatacatcattatttatatcacaagaaggaatttcatcttgacctgcataaaaataattttttatttcattaaaagaagtgagaaattcctgttctcctggtccaatccatgtaacattttcacaaaggtattttaatacttcattgatatctcgatttatataaaaacttgttataatatgttttgctaatttgggtgctttttttaggagtatgctcatgatattcctcctttctttttgctattatattttaattatattatacatcaatatatttaaattaaaagctttgttaaactatgatatctttgtcaaataagttaattttaacaaaaaagaactgaaacaatatatgcttcagtacttaatgtcaatatcttgtatagatacatatttataaactaatgtacaagtttaaaaaaagaaagataattttaatttattttaaaataacaatgttaataatcatttttatcaaattttttcttgtttttctccttgtttttatacatttttttatccaattcaactattgtcaattttaaatttctttttactgtatcaacaccataactaaatgaaagatacttatatttagagaatacttttaaaaaattttctcttaaggcttctagttgtgaataaacataatttttgtcaacatcactagagaatataacaataaattcatctcctcctaatcttataatagaagtagaatttattaattctttatttaaaagtgaaacaaaatcacataaaatcttgtctcctacattatgaccttcatagtcatttatcattttgaaattatctaagtcaattagtacaatataatctcctataaatatgtcaaatctatcatttaaatattttctattatatgctccagttaatgggtcagtaattgagtagtgaagatttctcttattttcttcatagagttttgttatatcattggccatagtaattatgtaggttttttcatcaacatctactttgtattctaaaacattccaatagcttgtagtatcttttttaaactctaaaatccaatttgaaattttatcataaggataatttttttcccaatctaattgaatattgtgagaatccgtaaaaaatttagcaatattatcagggagtttcttagctatttctatattagtcattccaagtggattatcttgcatataacttttaattaaattttttaaattatcatttataaatataattctgtagttagaatctcttataattagaaatcctggaaaagttcttaaaaaaatttctttaaacatattaatttctccaaaataaaatactttgtactagatttttgttaaattttttattttatttacatctacatacataccttgggcaatcgaccttccatcaattgcagaaaggttacattgtgtatacataactgtgacaatttgaccatctcgttttatgaatctatataaaaatggttcaattttatttgtgtcaatcatatccaaactttttttataaacaaagtctaaatcatctggatgaacaattgctcttaaatttccgcccatctcaccaaaaaactgttcttttgtataacctataatgtcaaacatttcttcattcatataagtaataatcatatcaccaaataaatcgtagcgaattatacctacaggcaacattgaataaaattgtgataaaatattactttcatcaagatgtgtatttgtcattttaggtattgaatatgattcaaattcatttatatagccagcagttttaattaaatccaaatgtaattttgctaagagtaatttattttctgaaattatacaatttgcactaaagtagaaattgctatatttttgatgttcagaagcttcatctgataaaacggcttctccactaattaataatgaatctgattcagtattatgtggggttatacttttgtaaagaatagaaaattttttacctttaatatgtttttcaaaatgttctattactttaggaaaagatgtaatttcagttttgttgtaaaaatcaaaccattgaatgtcttcagtgacattagctcttagttttttcatatcttgcataataaaaaatccatcaaatatcttctctattaaagattttcctatatcagaatattttataaacattttctctgaattattctctttagatagtaatttttcaaattctttgcactccatgggttttgcataataataaccttgggcgatatcacaatttatacttttaataaattctacatgttgttctgtttcaacaccttcacatactgtaagcatcccaagagctcttgcaatgtttattatagagtacaaaatggttgtatttttaaaatcatttaaattatgagataaaaatatcctatcaattttgattatatcaaaaggtagattttgcaacataccaaaagatgaatatccagaaccaaaatcgtccattgatacagaaaaaccataagaacgaagttcagctagttgttgaataattgtatttgtattttctattaatatattttctgttatttcaatgctaaaatttgatgtagagacgctgtacttttcagtaataccttttagcatacttggaaaattagggttaaaaaaatgaagacgagaaaagttacaacaaattggaacaaaaacatcattgttatcaatccatcttcttatatttttacagttctcttcaaataaatgcaaatctaattccgttatcagaccaaactgttcaaataaaggaataaatttatctggagtaagaagtcctttaatagggtgtctccatcttgcaagtgcctcacatccaactatagtattattttttatattataaagtggttggtaaaatacttcaatttgtttagtttgtagaacatgtgatatttctgataagaactccttatcattttctaatttattgtaaaaactattatctttaaaatcaaatagaatgtatctatttttgccttcacttttagccttttttaaagcactatatacttggttgaaaagtatcaaagtagtcatgtttggttcaccattccagatagtgctgccgatactaaatgtaacattggagtatatttctttttcattaggaagtcttatttttaattctcgggagctctctataatagttgcacccatattatttaactctttatttgatacatttggaagtacaattaaaaaaccttctccttttaaataagcgactattccctttgattctggaataaagtgcaataggttttgagttagagtaattaataaattttctccgactagatatccatatatatcattaaataatttaaagttatcgatatttaataacatgattcctatatgtatatttttcgaaatacagtcatcaatatattggtacataaattctctgtttggtattttagaaaaaaaatctatttcatttaaggtttttaatttaaaatttctactatctaattccttagataatacttctacctttttatttaacatttttatataattatgattttgcatggtattcctccataagatactttaaattttgatgacaactgtatttatgctagaagtatttaaatgttaatttgtaaataatttaaatgctaaattttaaataagtatttaaaatgaatatacattaagttatttgctccaatgctacaaatacaaatattttttagtttagtaataatattagataaaattagttaatgcttaaattatagtatattgaaagatttcctttttgaatgcaattatatcatattttttcataaatagatagattgtgagctgtatagttagtaaggtagagtttttttataattaattttaagtttaatgatttttcaaaggcataattattttattcataattaactttttatacataatttaataccacataattaattttagttattaaaattaagtttattcttgtattttttgttaaagactataataaatattcatttactaaatttataaactattaatctatagaaatcagttttaatatgaaaaatattacatagagatggatataatagctgtaaacataaaactatataaaactaaaatatatttataaaaaagttgaagttataaatactatacctaacattacaatataaaaatattttaataattaattattaggatgtttattttcctatccttgttttaaagatttttttagtatattctaatattatagtattatagagtaataatgttgatttaaaataaaaataggatttcggaggagtttattatataaatgaaagattactataaaataggagagatatctaaaatatatggaataggtagagattcattaatgtattatgaagaaataggcattctaagaccagttagagatataaatggatatagaatgtataatatatcagatatatggaaattaaatttaataaaagaatttagaagcttgaactttccaatgaagaaaataaaagaatacctagatgacagaagtatagagtctacgaaaaatattttaaatgaagaactcgatttaattgataaaaaaatagctgaatttataagccataaggaaaatattataaaaagattgagttcgattgaaagtgtaattcaaaatacaaaaatagatgagatagaggttgtatatatagaaaaaagaaaagctttagaattaaatgctgatataaagagggatgaagacttcgattttttaattcagaaacttcagaaagaatatgaagatagatttaatatacttggaaacaacaatattggttctgccttttctactgaagcaattaataaaggtatatttaatgagtttaaatctgtattttgttttctggaaagtaatgagaaagtatataatatagtttttgatgaaggatattatgtaactttaaattatactgggagtaattctaataataagatgtatatggagaaggtgtttaaatttatagaagaaaataattataagataattgctgaccctatagaaatctataagatagatatacatgagactggaattgtagaagagtttgtaacggaaattcaagttcctataactaaatagccatatttcaatggattagatggtaaatagaatgaaaaaatgttgatttgccaccgatttgctactgtgttataaaatcggtagcaaattatattttaaattataagatagcatgaaaaaataattgtttagggggttataaatgtgaaatgttctaattgtggaagtgtaaatattgaaaagggtattttaacaactggtggcatatatgctgaaactattggattaaaatatagaggagatggaaaattagataaagttataaataaaacttttccagtacaatctactatatattcagatttatgtttagattgtggcgaaatagttagaacctatataaaggataatactgataggaattggtgtaaagataagaaatagaataatttttgaagtatattaatatttgaagttgaattttattaaagatacaagtgaaaaagtataaatgggaagaaattgttatatggaagaaaactttgcatataggggagattagttttttaatataataacatttttaaatgtagataaaactaaaaagggttctctagaaaacaatttctatttaattatacttacttaccaataccatcacttgatgtaaacaagattctactacattttctccgtactctagtataaaatcatctagctgtgtatctataaaatcacaataatcatataaactactaatataagcagttaacatgtgtgtacatttatccatttcatctctaaacatatatattactatccccctaaaaaactttcataaaacaaaaagaacaatatctttttggcaactggctgacataactcatagtttattttataagcgttagtccctatagctttgcgtcactaaatttctctagttttgccgatttagttttattctacaactaaaataatacactaggataagttattgttcaacatacttgtcagaaaattgaaatatttaacagtatcttaacaatatgaaatctatttttcactcaagaaacaaactatacatgtagaatatttaataaaaattatatttagttttgtattgaagtttttgtattaaaaagtttagttcacaagagttacttggctagataatagatgagcaaaaatatcttgaaaaaatatatatgaatggcaaaaaacaagggatgaattttatatagactcatcccgtaattatttatatattgaccttgattaaatatattattatttttaagcttcaatttttatattatatttctaaagtttctataagaggattatcgctaaataattttaataaatttgtttttttatatcctttaggtaacttagtatatataactacttctaaccaatccccatcaaggcgtttaatattcatgtttataatttcaatattagattttttaaatttaccttcaatatattctatggaatcagtgctgttagaaattttaagagaaacttgctctgctgtagggagtttcatccacttcctatctctatgaagtgttatctgtacaataacaataatgatacttgaaacaataccaactaagtataatccagagccaatggcaagacctgtaccggctgttgcccatataccagcagctgtagtaagaccacttactgattgatttctaataaatattaatccagcacctaaaaaacctataccactgacaacttgtgctgcaacgcgggctgggtctagaccaatacctggagtacccactatatcattaaatccatacttggaaacaatgattataagtgctgaagctaatgccactataaaatgagtgcgtattccagcttcttttagtctattctttctctcatatccaattaaagccccacagaaaccagcagtaatgattcttgctatatattcaaattgaatcaatatatgatggttcatttatctagcacccccttctatataatattatatatactataatactacattttttatgtgaatatagtaaagtttaaaatttatataatagttatatatgaatataaaatgtataaacgtatattatgtatataaaaatgatagaaagcatctaattttaaatgattaaagagcaagcttaaataaatcaaacttgctcttttaacatagtgtatgtttttatttgtgatagttagataaaaatttatctgtgttttttacatctgcaaaactgttctgtagtgatgccatgaatacttgatgtacagtatttgcattaatttctatattattccaagataaattcttcgttgtacatgcatcgcttattagagttatgtcgtatcgaagtttctttgctgttcttacacttgtatcaatacacatatggctcatcattccacagattactagattagtaatattttttttctcaaggatactttgcaaatctgtttcaaagaaactatctggtgtgtgtttaattataatttcttcattatctagtggaaaaacaattttatttatttctgaaccatgagtattaggaagaaaaaaagaagctgttttatctgttgatatatgctgtatatgaataactggtaaattgttttttctaaaaaacagtagtatttttttagcattttcagcagtttcttctgattgaaataattcacattttccatttttaaaataatcattttgaatatcaatcaatattaaagctatagacatgattataccttctatttacttttattataatactattgtaaaaaatgtaaattacttactttttggtatgtataggattacttattgtagcaaattcctttattatctagaatttcttgttgaccatgttcaagcatatattcgattcctatttcttgcattatttccactgcttttaacatttttttaccacgattagtaagaaaatattcaacatgtaatggatatccagcagaacttattttatcaataatcccaaaatcacgtaactcttttaattgttgaatcaacattttttgatttattccataaatattatgttgcaattcagaaaatgttttattagattgtcttaattcaaatataaggatagttttccattttcctttgattatgtcatgtacaatttcaagaggacatgtatattcagctcttattttcatagcatatcacccccagtaaaatgataataaattatatcacttgtcttgtgatatgacaaatatatatgaactgtatataaattttatgttttattaagttctaaatttcttctattgtagttcatatttagtacataaataattagtaagatataagtaaataaatatataacatgactatagaaatttaactttaaaataacttatgataatttagaggaggaatatatatgaatatatcaagaaaagctatgaaaataatagaattagcacaaaaaattgcaaataagagaggtatttcagtagaagaagcttggagtgaagcagtaacagaatataaaaataaatacgaacatattgcatagatatttaaaaatttagaatatttggtagaatataatgattttaaatgatactataaattataaggtatatcattattaacatagaaggaggatatctgcttgattgtaaaaatagataatactttagaaaaagaattttggcaatatgtatcacatgaagaaagtttaaatttattcataattggatacgttgagaattatggatttagctctcaatatcaagatatatggtctcaggtagaagatggaaatataacctctataatattaaaaaataagtcaacacttataatttatagttttaaaaataattttgatataggagaaatgaagaatcatataaaagatttagatgtagaaagcataagtggaaaaaaatgtgtaatagatagactaataagtaaatacaaagatttttatgaaaaactagataataaattttgtgtattaaaagaaataaaagaaatagatttttccaacatgaaggagtataaaatagaaaatgctcaggaaaaagatattgatgaaataggaaaacttttaaataggtcagactataaagtaagtaaaaattacatagaagaaaggaaagaacatttaaaagagggaaatgtaagagcatattttattagaaatgatgatactatgattagcactgtgtcaactggtatggaaactagttttttggcaatggtggtctctgtaagtacagataaaagatataggggaaaaggacttgcaagttatatggtttacaatttgagtaaagaattattgttggaaggaaaagttccatgtcttttttataataatgatgtagcaggtaaaatatatcataatataggatacaaagagataaatgaatggacaattctttttaaatagctataaaaataataaattttcgtgtaattcttaacgtgtattgtataatcgctcaaatacttgaaaggtgtctagtagatgggtttgttagcatttatggtctccttatctaagtaaagttccctttggaaatcggtgaaatactcttttacatttcatgagtcctataaaatctatgacataagaaagacccagttacattgagtaattgggtcttattatcatatatattgtgtgcttacatgatatagttcatttctataaacgtagtatttcgtaagtgggaaccaattttttaacaagtgattatttgaacaaagcaataaggatatgctagcagatggattttgtataatttaaaaatcaatatttagactctatcatgtattttcatcatcataatccaatttgaaattgtatctaaaaccagtttgctatttccacagttacagtggttactagcttgttctgcttctgtcataagcctaaatgtaagggatcggacattgttgagtaaatcaatctctttaccaacagttctataatcaataaaatgatcttgtgttgcacctaaaatcaaaatgtcttggtttatattttttgcaatagaatctatttgataatacttgattttctgaaaatattcatagggtgtagacgcttcatatgcgtacattccatgttttaaaccccataccaccatactatcgccacttttcattttttgctttattataaaattgactagccattttgttttgagttttagcagtagtctaagtagattttgcatttttattggttgtgaaccaactattatgtctaagaaattggggaatacagaccaagctaccacgcgttcaattcgtttttcgaaggctgctgctcgtggagcaagaaaacctcccaaggaagcacctacaatagttatattctctaaatgaaaataatctaaaattgtcttaacgggacgttcccattgataagtaaagtgttttccctgcaaacgcatcactccaccttgaccaggtccctcaaaaagataaatatcaaatccctgtgacgcaagataaagcattgggaaaaagaattcttcaaagtaagaatcatttccaccgtggagcaatataacatcttttacctcgccttgcgcttttgcatacattacaggtagggtgatattttcatatggtacatgaaaaatttgtacagttccatttgagaaatattcagagtagtagttgtagaatagagtagttgcttttttgtagactgatattttatcagggtcaccatcatacataaaaaattcactcatacgatagtaagcaattgcattttctgtgcgtccatcttgttcagcttcttgtgccagatacataagttctgttttccaactttcgctatcgacaattttagaggaaactttttgtatatcttccaagcgccccccatcccacataataatcctgtttaactgaaaattaaaattggcatttgtattaaggtaatatagacctttattaaaagaaattttatttgttttcaatgtcatcactcctaaaaagataatgcatagcaataaagagtaatctttaatgctatgcatttattgtaacaaatattagaagtactgactttcaaatagacgctattggcggataaaatatattttacattttcctataagctcacttgcagtaatgccaagatattttttgctggaagctgagaaatgagacggtgaactaaaccctgcgtccatagcagctgaggtaatatctccactttttaacaataactcataagccttgcgaagttttgataaagccaaatagctgtttagtgatactcccatttgttctttgaaaagatgagaaaaccggcttttggacaattttacttcggcacatatctcaaaaaagatttcattgtgaatgtgtgtggactttagaatatgattcaatgcccattgtattctactgtctgtaatagacgaaatatgataatttaaattcaatagacggaaagcttgttttgaaaaatcaatatagctttgggacaatccttttacctgacaagctgtataaatattttgtattcgttcaactataagattatctataacgaaaaaagagtgatttagtaattggtgttgactaatattttgggcgagtatgcttgtatcatctatcaagaaaaccaacattttattatctttacttgacaccgtatgcgatacattggaatcaataataattcctttacattgtaatgattcgcccttatcaaacgtcacagataagttaccagactgtgatataataatatgttttgcaagatgtttatggatagttggttgtctatactctgtatctaaaaatatatggtcaatcattacacaaatggtagtcatagctgtcaactccttgttcatagcttagcatattatacagtttttaacaagaaagcttagtgattacaagtatttaaaaatcctattttaggcaatgaaaaataaaaaactctatcgagaattaaagtatttataaataactatatttttactatgattcatgatagagttttttaaaatttatgatactattttttattatttaaataatcaagtgttttaagtttataaccttctttttcccaatgtgtaagaacctcatctaatatctcagtatttgttgatgaatttggatgcagtaaaactattgcaccaggatgagttcttgaataaattttgtttttggcaaattcatgagtaggttgtttcttttcataccaatctacataagcaaaactccaaaatattgatttatatcctaaatcttgtgtatattttaaagattgttcgctaaatttacccattggaggtctaaaatacttaggcatttcttttccagtaacatctttgtatgctttttctacacttgtaatttcttctttgaatttttcaaaatctgtaatacctgccattgatggatggctttttgaatgattacaaactaaatgtccttctttttccatacgctttattaactctggattgctttttatataactttcaactacgaaaaattgagctttagcattgtgttttttaagcgtatctaataattttggagtgtttccactttcatatccagcatcaaatgatagatatataactttttcattgggatttcctacataataagctccgtattttttaaaaaaatcagcttcttttataggtgatggctgtttaccatcctccctagggttaaaataccaatcatattcatgtgtgtcgagtgttggactagaaatttgagtttttgttttatctaatgatttaaaatttatactagcaattccaaaaagtattagagcaaatgctcctatcataatgtatttttttaggctatcttttttcacaatttcacctcttatttaaaatttaaagtatatttcttataatatagtttgaatatttatagttaaaaatattcacatatacaaataataaatgaaagaagtttactgtaagatataaagttgatattaattatcttaaataaagtgtatataaatgataaaatataaagagaaatgattgtaaataagttaggctggtttaacttgaagggatataaaaatggataatataataagtgtattgaatgatgttgtttttttagatatagaagttagtggattagattgtttaaattcagaaattttagaagttggagctgtcaaggttaaagactggaaaatatatacctatgaatcattaataaaaaacaaatttgaggtacctatagaagtattctcagtatgtaaaaatttagataaaaatgatttagaaatagctaatgaaatagaactggtggaagatagacttgtaaattttgtagaagatagtttcattatatgtcatgatttaagtctgaaaaaaaagttttttgagtatcatatgccaaagttaaaaaacaaatttattgatttaattgaattagcagttattttagaaccatatcataaagattatagcttagaatacttaaaaaatactttaacaaattgtaattctaaagtggaaaatagagctttatcagatgctattgatataataaatattgtaaattgccttttagtaaaatttaataactatgaaaaaactactttggagccattgagttttaaaataaattcatatcttaaaaaatttaatcttccaacatgggaatggagcaaatttttagaagaggcaaattatgatttatcaaataatataaatataaaaaaagaatataatatatttgactcaaaagaagaaaagaagaaggaaagagaaaccttaaaaattttaaatgaagaagaaaaaaattatgaagaattattaaaatacaaaactatttgggagaataaagaaggatttacatatgaatatagacctggtcaatatgagcttactaaaacaataagagagttgtttagaaatagcgaagatgaagaaaaaattgcatgtatagaggcaccaactggtataggtaaaagtgtaggatatttattgcctgcaatattagaggctagaattaataaaaaaagattattaatttctactgacacaaaggaattgcagatacaattaataaataaagatattccaaatgtgttagattctttgggtctaaatggaaaagtaagttacggatatataaagggaaaaaataactatatttgtatagatagactggaagcatatatagatgattatgagtctcaaaaccctactaaaggagaaattttatctttaatatttttgaagagattagttgaaggtggcaagtatggagatatagaagaaataaattatttagtgtttgacaacttcaaggaaataagtacccacttaagaaatgtaagttgtgacccaaatatgtgcagacctaaaaaatgcaaaaaagattgtttatataaaaacagaatagaagaattaaaagaagaacatataacagtagtaaatcattcactattagctaaatggccgtataaggatgaaaaacctttagaaaatataatagtagatgaagcacataatttgactgaaaaaggatatgatttcttttcaagcattataaattcaaagtctttaaggtatttattacaagaaatttatccttacgagtttattcaaaatagtagctttatatataaaaaatatagtagaaatatgagaaaaataaaggcttttgataaattttataatgtattaaaaattggaagagaagataaacaaaaaattgctagaagtataaatctcattattgaagagatagattcaatattaaagtttggtaattgtaatgaatataataatgtaagtaattataatttaagatgggaactgaatttgcaaatagatgaaattgtgggaaaactaaaaaaggatggtatagatactgaaataagttatagagcctatagtgaaaagataaagttgagttgtgagaaaataataaaaaatttagtttcaataataataataatttataggaatattgatgatgatagtatagataaagaagcagatatatataaatttggaaaggcaaagacaagagatttagaggatataaagattatatttgaaatctttttagagtatgatgaaaaggatgattatgcaaggatagttgaaattgataagaattataatgactttgaatttcgagtagtaccattaaaaatagcagatttatttgaagaaaatattttatctcaattagaaaaaggaatatttttatcagcaactttgagtttatctgaaagtatgtcttattttaaaaatacattaggaatagacagagttaagaatgtggaaaagattatagaaccaatttttgattataaaaatagagtctctgtagttggattttctgatatttgtgagtacagaaattctgaatttccaaatgagatgagtaaaattatatctaatatatcaaagattacagaaggtcatacattagctctttttaatagtaaagatagacaagaaaaaacttatgaaatattgaaaaaatacttacatagttttaacttagaaatttatgctgataaaaaggggattagacaccttaacgatttaaatagaaaatgtgtagtacttggctcaaaaggatgttttgaaggcgtagacattccaggggatggtttggtttgtgtaactttagacaagcttccgaatctaaatccaaaagaccctttgtattttactataatgaagaagtatggtatagactactatactataaattatcctcaaatgaccataaaggtaaagcaagctatggggagaattttaagaagcaaatatgactatggatgttttgtgatttttgatgtaggaactaatataagtgttttaaagagattagagaaagatttacacgattgtaaaatttcaaaggttaatagcaatgagttttatacttatataaggcgacatttaaataaatctagaagtttaatactaaaatctgttatatttgatactataaaagcgttgaatgttgatgctaaaatggataacaatgatgttgataaagatattataaaaaaagatataaatgaaaatataagacaaagagctgtaaaaggagaagtgtaccatattgatattataaaaaaagatatgaaagtaaaatattttgatagaaactatcttataaatttagatatatttatgagagaagaagataaaaattaagagtgggagtgagatatttggcaaaacaaaagttttatgctgtgaaaaaaggtaaaaatataggtgtatataatacatgggatgagtgcaaaaaacaagtaaatggattctcaggagctgaatataagagtttttctacttttcaagaagctaaagaatatattgatgggtcagaaaaattgagttttcaagaagataaggagtttatagaagcatatgtagatggaagttatgaacattcagtaaaaatgtatggttcgggtgttgtgattttaaaaaataatgaagttataaaaacttatagtgaaaaaggaaaagagaaaactttagtaagtatgagaaatgtagctggagagatagaggcttctaaaattgcaatgcagtactgtattgacaataatgttcaaaacttgattttatactttgactatgaagggattgaaaagtggtgtactggagtttggaaaacaaataaagaaggaactatagcatataaaaatttctatgacagtattaagaataagcttaatgtaaaatttacaaaggttaaagctcattctggaaataagtataatgaggaagctgataaattagctaaaaaagctattggtgtataataaaaaaatatttatacataattacatggtataagagtatatctaaattcctactttataattaaacaacttgtaattaaacaacttgtaattaaacaacttataattaaataaattttgattaaaaaagcagattgtattatgaaaaaataagtatctaatttataaacaattaataatagtattaattagatacaacttatttaatataataaaatctgctttttatataactataaaatcttcctacattctattagaattgcccataaataccttcaagttcttcttttaatacttcagggtcatttataccaatagacatggttctagccagtatatttgcttggtcataagttgatgtccatgagaatacaccacctagacaatttctaagaacatattgagtttttaagaatattgataaagcatcatcatatgacattgcaaaatctccatccttaactaaatacggaacttgagcagtattatcaaatctatattcatatccatttttatttatataatcccttctaagctcatcataagttcttgttatagtggcacctaatcttccataaaatggtataccgagaaggattttttcagaaggcattccagcattctcaagatttctcaccattgcatcaacactatatcctggcaaagataagtctgaatcaaaaagatttgcttgatgttttctaccatttgggcctgtttcacctgctgtaaaatcataactcataagattaaaataatctattataggagctattttatctatttcagcacttgaatttatatatcctctatctcctgttccagctacactaagccatttatcatctcctataacatctcttatggcagttagtaagagtgtaaagttttctctatcttgaggtcttgatgttattccagatgcactacttccaggatattcccagtctatatctattccatctaaagcatattcatttatcatctgattgacctgtcttgcaaaattatatctagatgtaggtgttaatgctgcatcagagaatccttcagctccccaacctccaatagctacaattacttttaagctaggtttttcacctttaagagcaagtaattgatttaaaaatctaggataaggaataaacaaatttccagactggtctatctcagcaaaagcaaatataactgcatctaatagttgagcatctacattagttggatttccaagaacatattctgctacaattggatttatatctggacagtttgcattttcaactattggattgtatgggtctgttatttgtggtctaactaatttttttgaatcttttaaagttttcatagctatttttttagtatttttttcgctagtataatcgtagtttttataattatgtttatagaaatcttcataactactatcttctttgttatagctagaatttattttgtcgcaagattcatctttatcatagttaaaattcatttcatcacaagacttatctttaaacttatcttgtttggagttgtgaactttgttagtatttttagtatgttttttctcatggttgcaatcatctttaatatcagtcttgtgttcttgtttacagtcaagagctttgttcaggtagtcatgatgttcatgttcacagttacattcattttcaatgtttttagtatgttcttttttccagctacaagtattatcaattttcttgctcacttcttcatcattataattatctggtacaaaacataagtaccagtccatacatgaatatttcttattacaactgttaactctattttttaattccttatagtttttaggataaggtaaaatcactggcattccaggaaaccagtttgcaggagtaactatattatctctatcactagtctgaagtgcatctactattctaagtatttctggaatatttcttcctgtagttagtggataataaagaatcgttcttagaatttgattattatctataataaatacagagcgaacagttgatgtatcactcattggttttgatatcatgccgtataacttggcaattctcatatctctatcttctataataggaaatggaatttctacacctgtaagtaaagaaatattatacatccaagctaaatgtgaactgttactatcaacacttagaccaattagttctgtatttctttttttaaattcgtcataatatttagcaaaacataaaaattctgtagtacaaactggtgtaaaatcaccaggatgtgaaaataaaacaatccaattacccttatagtcagagagtctaataggaccatttgttgtattggctttaaaatcaggagcctttgaccctaaacttggcaaatttggcatgtaaatcacccctcaataaattatcatttattttattctattaattaatacatattagtgttactattttattaaaagttaagtaatccttatgtcaaaaaaagatatttattaaaaagatttaatattttcctaatataaatgacaatagtaattgctatttttttactaatttggtatagtaatggataaggggtagtgtcaattttagtgattatacgaggtgattggattgaaaaaaattctaagaattttagttatctccatgatgatatgttttgcaatgacttttgcattagtgttaataaattcagttatgggagtacatataggattggattattactttttgatgggaagtgtgcttacagtttgtttaacaattggaattgttttatgcaatgctagaaaaatatttgatagcaaagctatacacaagacaagaacgaaaactgtcagtactaataaaaaacaaaagagtcattctagggatataaaaagaaagatatcataatttatgtaaaggaaatatttatgtataaaataatgattgataggtaaaataaaaacacgatttaacttgtgtttttattttttttcaagaattatgatataataaccaataagaaatttagtttaccataaaatataaagattattaaatggagagggaactataatgaattttagagatttatttgagaaggctgtagattttattgatgaaaaaaggaaatctatagttgcgatttcattatcaacattaggtgtaattgctttgataatagtatttttcttaagtagtaacgagtttagtgtaggaaatgaagctaatgagttgttaaagattatagagaaaagacagtattctatagctgttgattactacacaagtatagaaaaaaagttttctgattcaaaaatggaaaggtttaataagtctgtttctaaaaaaataaataaattgctattaaatagtggtgataaatatttagatggagacataagtcaagaaagttttattggattaataaatactgtgaaagaattaaacaaaataagtatagatgtggatgacttattagctcaagctgatagagttagagaaatgtataaagaagaaaatactacttatgatattgccattaactacataagtactgtttcaatattaaatggtatgggtagtaacctagatgtatacaaacagaatatagaaacaatcaaagagtctagagatgtttatgactcagcagtaaaagaccaaaaagcatataagtattatgaagctattgaaaagtataataaagtattaaaagaagatgaaaagtattacagtatggctcaaaatgggaaagaacaatgtattgaagaaatgtatgattactatataagtagagctgaagaggcaaatacttctggagattatgaaagagcattacaatatattgagtatttaaaagaagattattcagatgatgaaaaggtacagagtttagaaaaaaaatataaaaagaatttatcattgtataccttaacatctgatgacattataaatgtaatagctaaaaaaagtggcaaagacaaggcaaatctatctataaattcacttccacaaatgataaaaaataataaatactattatgctgaagtatatgagtatgataaattaataaatgaagttttggtaagtgcaaaaactaaagatttatattcgtataaagatggtaaaaaagattacaaagtagattatggtgatggatactttagaatattagaagatggaagttatcaatttggtattacaaaagataaagctaagtttgtgttaactaatactcttgatgaaaaagaaaataagtataaaaagattgagatattagatatagagaaagcagatagatatgtaaaaagtaaaaagagtttagaagaattgtttggaaaatataaaaatatttattattatgctgtagtaaataaaggcttatttagaggcaaagaagtttatgctattaatatttacaatgaaaaaatatatgccatatcagaaaatggactaaatgaatattaattaataatattaaattaatatataattaaaaagtttttggggttttaaggcgcattatgtagtaatataataatagggatatataaataattttattgtaaggagaagtatgggatgagtaatgtgaacaaaaagctagttatagctattggagctgtagcattagtagcaataatttttataggcataatgtgcatgcaatttaaaggggagaaaatagcaaaaaacacatatgttaatggagtagatattggaaaattaactaaatcgcaagcaaaacaggaattagctaaaaaatacaaattagagaatgttgagtttaattacaatgataaaagttggaaagtaaagagcaaagatttaaatttatctactgatctggataaaacagtagaaaacgcatataatttaaatagaaagagtagtttctttggcaatctatcaaaaactatttcaacaaattttggcaaaaaaagcaacttagtagttgtgataaattatgataaaaataaattaaaagcagaaatggaaaaaatagctaaagaaatagatgtagatgtaaaagatgctacacttgatataagtggtgaaaaagtcaaggttataccagattctgatggtcttaaaatggatatttctaagagtatggagaattttgataatcaaactaaaaaaggtaactataaaaatgagttagtagtaaaagctactccagcaaaagtaaaaaaagagcaacttactaatatagatacaaatttaggtacgtattcaacaatatttaaaacttctcaaataaatagaagtataaacataaaattagcaacagataatataagtaatgtattacttatgccaggagaaactttctcatttaataaacatacagggaaaagaagtaaggaaaatggatataaaagtgcacctgtaataatggaaggtgagatggaagaagattatggtggaggagtttgtcaagtttcatctacgttatacaattctgtgttatacgcaggtttagaaattgttaatgtaaaaaatcatactataccatcaagttatgttccaaaaggaagagatgcaactgttgcagatagtggaatagatttcttatttaaaaataatctaaagcatccagtttacataaaaaattacgtttcaggaaatcaaattgtttgcaatatatatggaagtgcagaagataaacaaaatataacgatatcaacaaaattagatggcgtttcacaaactacaatgaaaagagttaatgaccctacaatgcctaaaggtaaagaaaaagtagacaaaagtggaagaaatgcatattctgtatcaacatatagaacatttaatgatgcaaatggtaaaaaaattaaaactgaaaaaatagctaattcatattatcctaagaaggaaggtattatattagttgggactatggaaccaaaaccagaggaaaaaccaaatacagacgaaaataagaataatcaaaatacaaacaatcaaaatccaaataatcaacaaaaaccagaaacaccaccaactgataataagcctaatgagacacaaccacaaccgcaagcttaaagttctcaagaataggatttatgtagagtaataaaaaatataaatctaaataggagggattactttgaatttaaataatataacgaattacgttcaaagtatttgcgagaatatttctaatgtattggatgtagatgttactttagttacaaaagatttaactaggatagcaggtacaggaatattcagaggtaaaataggagagacaatatcagagaagtcagtgtactctcttgttttaaaagatggaaaatcctatgttataaataaggaaatagaagagaactgtaataaatgtgcaaatagagaaaattgtaaagaattagctgatatatgtactcctgttaaaatgggagaacatatacttggaatcttgggtatagctgcgtttaatgaagagcaaaaagaaaagatactttcaaaagataaggagttaactgcttttgtaaggagtatgtctgatttaatatcttttaaactagatgaactttataaacaagaagttaagactatagatgaccttgagagggaagctatagaaaatgccataaagaaatatggaagtaatacagaaggtatgaaaaaagtagctgaggcattaaatataggtatagctacactctatagaaaagtaaaaaaattcaacattaaaagttaatagtattgaaaaagaggtaacctttttatgaaaagaagaggattaccttttttattatgagaatggtggaaaaatatgtatagttttgacttgacatattaaatatgttatcttaaatatatattttagagtggaggtgagtattattttagttaaagatataaaacaagacatagaaagcatgcctagaaaaattttagatatatctttgatagaagataataaaagtgatttgactttttttaatatagaagaagaagacggtgatgaaacattaaaagcattaaaacagagttatgtgactacaaattataaagaagaaactctattaaacttgcaaggagctttaaattcaaagtcagacacaacgtctaaggagttaaaattagaatcatataaaagatataacaatgcattggatttagcatataaaaattatataactagtgccattaatatggttaataaagctctggagataaatcctaaagatattgatatactaaatcttagaggtcttttaaagttattaaaatgtgattttgctaaatcatttgagagtttttatactgctttatgttatgagaataatcatatatctagaaaatatgtaaatctaatttcatctgaagattttaaaacttttttaggaagatacaatcattctataagatttataaatgaagaattaaattatgagtcaatacatattttagagaacataattgaagaagagcctgagctaatagagccatatgtaatcttatctttgttatatgataaactaggtaatgtaaaaaagagagaaggatatttagacaaacttaaagagctagataaagataatcctgtatttgaaaaaaatgaagaagaaaaagaagatacaagtaaaaaggaagaaataagaaaagtaaaaagaaagaaaagtattttaccatatattatagttggctgtgttttaataggtatggggatatatttgattcaaagcaaaaagagaatagaaaacttgaataaccaaataagtagtaaagaggaaaagttaagtgaaactgataaaaagttaggagaaacgagtaaaaaattagaaaaaacgaataaggaattaaatgaggttaaaaataaagaaccagaaagagagataactgtagctgatgaggaagatttatattatcaagctctaaatttaaagaaaaacaaagaatatgaaaaagccatagataattttaaaagtgtagtttcttctggtaaaactaaaaaatatatttctgagtcaatatatcaattagcaataacaaataaattattaggaaataaggatgaagctataaaatattacaaaaaatatataaatacttatactaaaaatgaccagtattatgatgattcatattacgagttgggtatgctttattatgataatggcgatttaaaaaatgcacaacagactttttatagtttgagaagtgaagttccagacagtatgtataacaattcaaaaataaaagaaatcttaagtgaaaaataggtttatatagttaagttttttgaaacaaccaagtatgtattttattaaattaaaataaaaataaatttaaaaagagattgtgtcaaattataactttctattttaaagaaagatatttgcttgttgataaaactacaaatatatgatttgaagcaatctctttaatttttggaggtggaaaatgaaagttttcaatcaattagtaataattttatctatctgggtaataggagagtatataagttcctttatacaaggaattatacttattcctgggagtatagttggtatgctattattatttctactactacaatttaaagttttagacttgagtagtatagaaaatgtaagtggatttttcctcgataatatggctatattttttattccagcaggtgtatcacttataaagtcattagacctaataagggaaaatgtattagtgcttttattagtcatatgtttaagtacactaatagtaatgtatactactggaattattgtggagaaaatgataaaaaagaaggaagaaggacaaaaaaatgtataatgtattacagacaccagtatttggtataatagtaacaatagtttttttcaatttaggaagatacattcaacgaaaaacaagtaatcctatatgtaaccctttattaattgcaatcgtaggaataatattgtttttaagcatatctaaaatcccttatgagaattacaagataggagctgatagtctaaatttctttttaggtcctgtcacagtagtacttgcagttccactttataaacaatttgaattatttaaaaagcatatgtttgagattattgtaggaataggttgtggtatagtgatttcttttgtatctgtattgataattggcaaaatagctaattcagatgtaagtataataaattcactaattccaaaatctataacaacaccaatgggaatatctttagcaaattctttaaatggtatagaatcaataacagttgtagccataatttttacaggtatttttggtggtatggttgcttctacagtattcaaactggggaatataaatcatccagttgctaaaggaattgctcttggaacatctgcacatgctttaggaactacaaaagcttttgaacttggagaaatagaaggagctatgagtggtgtttctattggagtttctggtacaattacagtaatactaattccaattataatgaattttatataaaaaataaaattaagacgagtaccttgaatacttaaaacaaaataaaataaaaaaaatttaaaataaaaactgaacgaaaaaaatgcaaataatgaaataaaaaaatcatgtactgaaattataaaaagaaaaatttcatttaggaattaattataaagagataattactaaacttgaatttgctaaaataaaataaattactgcgaaaatagatatttagaaaaaaatactataaatttactatattgcaagttaaataataagcagtatcatattatgctagaaaaagtttcatttaaggcataaatgagatgatttgaacgtttttaaagattagaatataaaagattgcactagacatatatgaaaaagataatataatagatgatgtaatagatgacagttcaagaaattataaaaaaaatttatttgaaatattatctattacatcaggaataatatatgtaagagtaagcttttaaaattctaaagatttagaaagattgaagggagaaagaaatgagtgaagttaagaataccctacaaaaacatccagttttaagatattcaacaatgctatttgggatgttgatgacatctataggaataaatgggttcttaagaccagcacatctgcttagtggaggtgctacaggtatagcaacatctataaactatttgacaaatataaatgtaggtttattaacatttttaatcaatattccaatatttatcttagggttcatataccttgaaaaagagttttgtatttcaagtttggtaaatatgattgtattttcattattattaggagcaactcaggaaataagtaatattatacctatacatgatatattgcttcaaagtgtatatggtggtatattatctggtttaggagtcggagttgtatttagaactaggtcttctcaaggtggtacagatataatagctgcaatactaaaaattaagaagaatatagaaatgaaagacactgctttagcaataaatggcttgatagtacttacaggaagttttttatttgggttggatttagcattatacactcttataggtctatttctaaatgcgtattcaatgagttttattaaagatgcaatgaattaccaaaaatctgttatggtaatgtcaaatgaagtcgatttaatagcagaagatataatgaagagtttagttagaggtgtaacttttttagatgcagaaggtgcatacactcatcaaaaaaagaagattatatatacaatagtttcatcaaatgagataccaaagataaaagatatagctttgaagtatgataaaaaggcctttatatctgtaaatgatgttacagaagtaaaaggaagagggtttaaagcaaaagatttatagaaaattttacaagctgggagtttataatgtaaatttgtatattatatctctcagcttatttaaatttagtatatgaaaataaaggttttatcaatgatttgtgtatcactttaaaagatatcattttaaaattaaaattgaaaaaattactcaatatgtagaaaacataaccactattaggatataataaatttaatagatttagtaaaatatctaggaataacgttggaggaatagcattatgaatttatctaaagaatatgttaatttgtatgataattatttgaaatatataaatgaagtaaacaaagagattagaagtataaagaacatgaagaaacgtgttttaaaaaagggcgattttgctccagaaaatgaagtattagaattggaaggaaaaacaatacgcgatatagatgatgtcgatacaaaaaaaccaaaaaataaaatatataaattttcaaatggggatgtgtatgtaggaaaatttttagaaggaaagatggaagggcaaggatcatatactttttttgttgatgaaggaacggctatggagtacataggagagtttaaagaagacaaaaaaaacggaaaaggaaactttgtattttcaaatggaaatgaatatataggccattttgaggaagatatgatgaacggtattggaaatatgttatataatagcaaagatgaatatattggaacttggaaaaatggaaaaaaagatggaaaaggtatttataagtggagtgatggatgtatatatgcaggtgaatttaaaggtggaaagatggaagggtatggtatttgctataatagtaaaggggaagtactttatgaaggagaatggaagaataatttgattcatggtaaaggaacttatatatgggaaaaaggtaaaaagtatataggtgaatttatgcatggtaaaaaacatggacaaggaactttttatctaaataatgaattggtttatgaagggacttggaaatttgataagccatccatcttcgacagaacattagatgaaatattttcattaagactatagctttatctattaatagataaagcttttttctaatacttactgtaaataagtatgaatgatattgattagtatacactatcaatattaactcaataaatgtgatattaaaaatttttgattgattttaagaaggagggatatattgaagagattaattgctttagtgttagtaatacttattgttttattttatagccctgaattgatagaagaaggatatgatttaaaagaaaaattttttcaaagtgaaatatggaatgaatttttagacaaaataaatataaataataattctaagaaagataaaaaagaacaaaatcaaaatttacaatcaaataatactgaaggggagaacttaggagagtcagatataaagaattttgaaaaaataagcttaggagataatttaagctatgttttatcaagtattggtaaacctggtagaattgatattagtgaatatggttttgattggtatgtatataatcaatatggaaaagaatttgcaatggtcggacttgaaaatgatgaagtagtagcactttatagtaattctattaattcatgtgaaaatcaagatataaaactaaatcaagatagacaaacagtgagaactaagattacaccattaaaatataagagaaaaggaaataccagatatataataaactcagaaaatcaatatgatataataagtaaagaaggtaagtatattacaattttctacgatattcatgaagaaaatagagtttgctcatatttaataattgataaaagtactgaagatgagtttaaaaaattatatccagatgatagagaagaacttaaaaaatgttttgaacttgaagttatagaccttgtaaatagtgttagaaatcaaagaggattaaactcattgagatacagtgaacaggcaactttgagttcaagaaaacatagtgaagatatgagagataataatttttttgaccatataaataagaagaatgaaactccatttgacagaatgaaaagagaaggtatagtatatacttcagctggagaaaacatagcagcaggacagattaatgcaatatatgcgcatgaagcttggatgaactctgaaggacatagaaaaaatattttggggaactataataatattggagttggagtaatatttggaggaagctataaaacatattacactcaaaatttttataaataactaaaatatttgaaaggaagttaaaaaatgacatcatggaaaaaaaagacagtatataagtgcttaatagcagtagtcttgttttgtggaatagtgttaatatctaattttagtaaagtttctgctttgatgatggatactaatggaaatgttttgattaaacatggttcaagggaaaaaaagctaatagcaattacctttgatgatggtcctcatcctaaagaaactagtcaagttttagatgtattaaagaaatacaatgtaaaagctactttttttatagctggaaaacatgcaaaatggtataaagaaccattagtaagagcaagtaaagaaggtcacgagataggaaatcatactttcaatcatcctgatataagtaatttaagttctagtcagatagaagaggagattgttaagtgtgaagacattttgaaagaagtaactggaaaaaaacctacattatttagaccaccatttggaagttatagagaaaaagacttaatagaaattgcaaaaaagcatgactataaagttgttttatggacaggtgtagatgtgaaagattggaaaaatccaggagctaatagcattgcagataaaataattaataaagtaaaaaatggagatataatacttttgcatgattatgcaactaatgatacagttgaagctttagatatgtttattccaaaaatgattgaaaaaggttttaaatttgtaacagtttctgagttgataaaataatttttaggggggagatttacagtatgattcttatgatagacaattatgattcttttgtatacaacctagtccaatatatagaagaattaggggaagcagttgtagtaaaaagaaataatgaaatcaaaataagtgacattgaagaactaaatccagaggtaattgtgttatctccaggaccgtgttctccaaaagaagctggtatttgcatagatattgttgagcattttaaggggaaaaaacctatactaggaatttgtttaggtcaccaaactattggatatgtttttggaggagatattataaaagcacaacagcctgtgcatggaaaagtatatagtatcaaccatactaataaaggagtttttaggggacttaaaaatcctttaaatgtcactaggtatcattcactaataattgattccaatacagttccaaaagaattagaaattacagcaattactgataaaggggaaataatggggattaggcataagaaatatttaatagaaggagtacagtttcatccagaagctattttgtcagagtatggtcatgaaatgcttgaaaattttataacagaagctagagaaagggtacatatgtaatatgataagagagataaatactaaattaaattcttttgagatatttactatttttagaaatgaacatgacagttttatattagacagtgctatggataaagaaaaattgggaagatattcttttataagtagccaaccatttaaggtattaaagtataaggatactgatgaaaatcctttagaagttttaaaagaagaactacataagtatagggttgtaaatgatactaatcttccatttgtaggaggtgctgtgggatatttatcttatgatttaggtaattacatagaaaatttacctagaactgctgtagatgatattgagatgcctgatatgtattttggattttataatcatgtaatagttatagaccatcttgtgcaaaaaacttatatagctactccaaacatagatatcgaattagaagaaaagataatagatgatatagaacaaagaatattaaaagaagagaaaaaaggtatagatagcatatgttatgaagaaaaagaagtaacacctataagacttaaatctaattttacaaaggaagaatttaaaaatgcagttcaaagtgttagagagtacataagacaaggagatatatatcaagctaatttaacacaaaggttcagtggagaaacagaacttacaagctttgaattgtatagggacttaagaagatttagcccagcaccatttggggcattcttaaactttgaagatacacatatattatcaaattctccagaaagatttataagatgtgttaataagagaatagaaactagaccaataaaaggtactcgtccaagagggaaagataaagaagaagatttaagacttcaacaagaacttagaaatagtgaaaaagatagagctgaactacttatgatagtagatttagaaagaaatgatattggcagaatatctaaaactggaagtgttaaagttccagagctatttgtaattgaaccatatgcaaatgtaaatcacttagtttccacagttgtaggtgagttaaaagatgataaagatgctactgatgtaataaaagcaacttttccaggggggtctataacaggagcacctaagattagagcaatggaaattatagacgaattagagccaacgcaaagaaatgtatatactggttcaataggttatataggttttaatggtgatatggattttaatatagcaattagaacaataatcaaaaatgacaaaaaagtctattttcaagttggaggaggaatgacttgggattctgacccagatgaagaatatcaagaaacacttgataaagctaaatccataatgaaggctttgaggggatattatgaagaataatgtaggttttgatagtagtttaagtaaatttggaattggtttgtttgaaactattagagttaaaaatggaatagcagtagatttagatatccatatagaaagaatgctaagttcaataaattgtttggatttagatataaactataaaaaagatttcttgataaatgaaattgttacatatataaaaaaagaaaatgtcattaataaagcacttagaattactgtttttgatgaaggttataatatatctattagggatattccatataatcaagagacgtatgagaaggggtttaaattagctatatcgccaatagttagggggaatagtttaattcatagacataagactactaattattttgaaaacatatataccaaaaatatcgcaaataagactggttataatgatggtatatttttaaattcagaaggtgtaatattagaatgttctatgagcaatattttctttataaaaggagaaagagtgtacactcctagtgatagattaccgatattaaatggaataataaaaaaaaggattatagagatttgtgacgaattacatatagagttgatagaaaatgaaattaatatatcagaaattagtagttttgattttgtttttgtcacaaatagtcttatgggcgctataaaggttacagaaattgacaaaataaaatttaataaagaaaatgttgtttttgataaaatagtgaagttattagaataaattaaaatattaacaatttgttggagacaaaagatgataggttgtatttatgaagtatacaatgaagagatgactaaaataatagaaaaccaaaacactttggctgtatatttagtaggttctagtaaagacgtagattttactctttatgatgtagagataaacgatattgatgtgttcgtttttgtaaaagaaggggaaaaacaagagagaatactgtttaaaaaaaagggaatagaatttgatgtaaattacttttcaaaagatggtgtaaaaaaattattatcaaatagggaatatttctttgtgaaagaaatgaaagatgctaaagtactgtttgatagggagaatatatcaaatattataaaagatataagtagagatatttacttagaaggacccagtaaaatgtcattagaggaaaagtcttttataaagcaagatattggagcaaaaatatcgaatttaaaaaataaagaaaaatttgatgtttttgaatatcattttttgacgaatttatatttaaaagatataataattgggtactttaatataaatgataaatgggtaccaaaagacaaaaaattgctaaaagttttaaaaaaagaaaataatgagctttttgaactagcgtcaaaagtaagtgaaaattatgactatcaaagacttttagatgtttataattatatttttaaagaaattgagacaaaagaggttataaaactaatcttctagtcacaaatcaatggggggagtttaaatgaataaagttgataaagaaaagatacaacatgcagtaagagaaatactagaggcaattggagaagacccagatagagaaggtctaatcgagactccaaatagagttgctaggatgtatgaagagatattctctggtcttagtgaagaaccaagagaccatttaaaagttctttttgcagatgaaaaacatgaagaattagtattggtaaaagatattccattttattcatgttgtgagcatcatctagttcctttctttggaaaagctcatattgcttatttaccaaaaggaggaagacttacagggctttctaaacttgctagagtaatagatacattggcaaaaagaccacaattacaagaaagaatcactaaaaatgctgcagatataataatggaagaattacaaccttatggtgtcttagtagtagtagaagctgaacatatgtgtatgacaatgagaggtgtaaaaaaaccaggttcaaaaactgttacatcagcagtgagaggaatatttgaaaaggacattgcgtctagagccgaggctatgagtttgattactatgaagtagcaatttattatagatataatcatttattgagatataaaatttaatttaagggagtgtcattaattgtgtttgattatggtaaaagaacttatataatgggaatattaaatgtaactccagatagtttttctgatggaggagattttaataacttggacatagcaatacaacatgcaaaagatatggttgaccaaggtgcagatataatagacttaggaggagagtctacacgcccaggtcatagctatgtagactcagacgaagagctaagaagagtaatccctgtaataaaaaaacttaaacaggaattggagataccaatatcaatagacacttataaggcagatgttgcagaagaagcattaaaattaggtgtcactatggtaaatgatgtttggggtcttagaaaagataaaaatatggcttctgtaataggaaaatatgatgcagaagtgtgtataatgcataatcaagatgggacaaactatgacaaagatataatggagtcaataaaagacttttttaaggtaagtatagaaatggcaatgagttgtggtgtaaaaaaagaaaaaatagtacttgacccaggcgtaggatttggcaaggattttgaacaaaatattgaagtattgagaagattaaatgaattaaaagatttagggtatcctattttgcttgggacatccagaaaatcagtaataggaaaagtacttccagttgagcctaaaaaaagattagaaggtacaatagctactactgttcttggtataagagatggcgtagatatagttagagtacatgatgtttatgaaaatttaatggcagctagaatgactgatgcaatatatagaaagtaggtataatataatggataaaatattacttagtaatctaggattctatggatatcatggtgttcttaaagaagaaaattttctaggtcagaaattctttgtcgacatggaactttatattgattcaagagaagcaggtcttagtgacgatataaataaatctgtaagctatgccgaggtttacaatgttgttaaagatattactgaaaataaacaatttaatcttttggaggctttagcggaaaatattgctgaagaagtcttgaataaatttatacttataaatggagttatggtcagagttagaaagcctgaggctcctgtaaatggtatttatgactattttggtgttgagataaggagaacaagagatgaataaggcttatttgggaataggtactaacatgggtgatagatttgataatttatcaagagcatgtgaacttttgaaaaatagtgattctatatataaagtaaaggaatcaagtttatatgaaacaaaaccatggggatatacagaacaagcagattttctaaatatgtgtgtagaaatagaaacagaatttgaaccttatgagttgttagaatattgtcaagaaatagagagagaactacacagagagagaatagttcattggggaccaagaactatagatgtagacatactattttttaatgatgtagcttccactgatgaaagactaacaatacctcatccgaggattcaagatagagctttcgttttgataccacttatggatttaaatgaagaacttataataaatgaaaaaacagtaaaagaacatttaaacctcctatctgctgaagaaagagaagaagtaaaggagcttgtaggttatgaaagaaaacctatttaataataattcaaagatagagataaatacaaataacaaaaagataactgtaaaaaaagataaacttataatagctggaccatgtgcaatagagagttatgagcaacttttggagactgctaaatttgtaaaaagtcagggagcaaatattttaagaggaggagcgtacaagccaagaacatcgccaaattcatttcaaggattaaaaaaagaaggtcttaaaatattaaaagcagttaaagacgaagttggtatggctgttattacagaacttatggatgtaagagatatcgacgaactgtatagtataagtgatataattcaaattggttcaagaaatatgcaaaactttactcttttaagtgaagtgggaaaacaaaataaacctgttatgttaaaaagaggaatagcatccacaattactgaatggataggtgcttctgaatatatagcaatagaaggaaatagtaacattataatgtgtgagagaggtataagaacgtacaatgattatactagaaatacattagatttagctgcggtacccattattcaaaaggaaacaggtcttcctgttgtggtagacccaagtcatgccactggagttagatatttggtaaaacctatgtcactggcatcttttgcatgtggagcagatggaataatggtagaagtacatcctgacccagaaaatgctttgtcagatggtgctcaatctctttgttttaatgaatttgaagatttaatgaaatcaattaataattattaaaagaggcaagagcctcttttttattcgtaatcattgctaaggtaaatttataagttataatttgatagttagattatttaatataaataaagatttaatattgatagaattaatataaaaaataaaaattttttgattaataagaaggatatcaataaaaaaagtcgaattgtgtatattgagtgattgacaaatttagaatatagtgtagaatagaaatgttaacacaaaaaattacaccagaaggtgataatatgaatgatataaaagacattattgaagaaataaaagctagatgcgatatagcaagtataatatctgaatatatgaatataaaacaatctggagctaattacaaagggttatgtccatttcatggtgaaaagacaccttctttttatataaatacatcaaaacagatttataagtgttttggttgtggtgaaggtggagacgtaataaattttgtcatgaaaatggaaaatttggattttatggatgctgtaaaaattttagcaaataaatgcggtatagaaattaacactaacatgaatgaagaaactaggattaaaatagaaaaatctaagaaatttcaagatatccatacggaagcagctagattttatctttcaaacttattgggaagcaaaaatcttgggtatgaatatttaagaataagaggactagatgataaaattattaagaaatttggtttaggattttctttggattcatggaattcacttatgaatactctaataagtaaaggatacaaaaaacaagacttattggattgcggtctaattgcaaaaaatagagatggaactaattgctatgataaatttagaaatagagttatgtttcctatatttgactatagaggaaacataataggatttgggggaagagtattagatgattctttgccaaaatacttaaattctccagacacattaatttttaataaaaaacagaacttatacggattaaattttgctagaaaaaatttagaaagtaaaactatagtcttagttgaaggatatatggatttaatttcgctttatcagtatggtataaaaaatgtagtagcaacccttggaacagccttgactgaacaacaaggcattttaataaagagatatgcggacactgctattatatcttatgattctgatgaagcaggaataaaagcgactttaagagctatagatatacttactaaattaggtatcaatgtaaaagtgttagacttaaaagatgctaaagacccagatgaatttgtaagaaaatacggacttagtgattataaaaaagctatggatgtttctactcactacataaaatataaaatagatcatcttaaaaaagaatttaacattcaaaaagatgaagaacgagtgaagttcgcaaaagaagcttctaaaattataaaacaattgacaagtcctgttgaaattgatttttatacaaagtatttaagcaatcaaatagatattaatgtcgagtctataaagagagaagtttatggcaaaaattacaataagccatataataacaaaaatcaaaagaaaatagaagaaaaagtaattgaaaaagtcgaagtcagacaagacggaaaacaattagttgaagaaactctaataaaaataatgttagaagacaaaaaaattagagaaatagcgttacttaaagtagaagaaagtgattttttattgaaagaaagtaaagaaattttaaattacatgattaaaaatcaagaattggacaaaataactattgacaaattgaaaagtttaaacatatccgaagaatacttaaaagaattaaattcaatttctttgaatagtataaacttagagaacacaaaagaaatagaaggaataataacaaatatcagaaaaaactcattagaagagcaaattaatagcttgttgagagaacaacaagaattagaaaataataatgatatgaaagaggtagatggtagagttatggaaattgctttaaaaatagttgagataaataaaattttaaagagcttgtagagaaaggaggtttgagtgtggaaaataaatcgaataaaaaagagttaaaaaaggttactgctaagacattaatagaaaaaggaaaaaagcaaggttctctgacacttgcagagataatggaagctttttcggagactgaacttgataaggatcaagtagaaaatctttatgagactttaggaaatttgggaatagaaataacagaaacaaaaaattataaagctgatatagatttttcggttgctgatgacgatttaagtataggccacttagatgaagatgcagaggcaatttcacatgatgactcttctgcaatagaaatagaaactgtggatttatctttaccaaaagggataagtatagatgaccctgtaagaatgtacttaaaagaaataggaaaaattcctctacttaaaccacatgaagaagtagaatttgctagaaggatgcacgaaggtgatgagatagcaaaacaaaggttagttgaagcaaacttaagactagttgtaagtatagcaaaaagatatgtaggaagaggtatgcttttcttggatttaatacaagagggaaatttaggtcttataaaagcagtcgaaaaatttgactatacaaaaggatataagtttagtacttatgcaacatggtggataagacaagctataacacgtgctattgcagaccaagctagaactataagaataccagttcatatggtagagactataaataagctaataagagtatcaagacaactacttcaagaacttggaagagatccaaaaccagaagaaattgcaaaagaaatggaaatgacagaagataaagtaagagaaataatgaaaatagctcaagaccctgtgtctttagaaacaccaataggagaagaagaagatagccatttaggtgattttattccagatgatgatgctccagccccagcagaggcagcagcatattctttattaaaagaacaaatagaagatgtacttggttcgttaaatgatagagaacaaaaagtattaaagcttagatttggtcttgaggatggtagagccagaactcttgaggaagttggaaaagagtttgatgtaactagagagagaataagacagatagaagcaaaagcactaagaaaactaagacatccaagtagatcaaaaaaacttagagattatttagactaaaaagatacatcattgatgtttttgtgataaatgccatgagataagtgatatctcatggctattttgtagtaaagatttaattttatttttgtagttatttcagtctaatatctataacttggattaaatcctataaataaagggaattgaaaggagaattatatttgaaattaacagatagattattgaaaatagcatcattagtgtcagatggtaaaaaaatagctgatatagggacggaccacggatacataccagtatatttgttaaaagagggaaaagtaccatttgcagtgctagcagatgttaataaaggacctcttgacaatgcacataaagaagtcatacagaacaatcttttagataaagttgatttacgattgggttctggtatagagatacttgaaataggggaagtagaagaagtgataattgctggtatgggtggaatcttgataagtgagcttctcgaggctaaaaaagaagtagcacataatgtagaaaaattaatattacagccaatgcaagcacaagaagaacttagatattaccttttaaacaacggatatgaaattttagaagaagttttagtgagagaagattttagaatatatgagataattgttgccaaatatacaggtaaaaatactataatagaagatgagatatattatgaggttggaataaagcttttagaaaacaaagattctctttttaatgattttatagaaaaaaagataaagacatatagttctatagttaataaattagaagggaaaaatggggaagctatagataagaagagaaaggaaagcgaagttgcaataaaaaaacttgaaaatttaataaaataaataggaggtatatatgctattaaagagtctaactagaaaaattgaaaaaaagtatcctctaaacttagcagaggattgggataatgtaggtcttatagttggagattttgatatggatgtaaaaaaggtattggtatctttagaagctaatgaagatgttattgatgaagctatatccaaaaatatagatttaattgtgacacatcatccttttatatttgggaaaattaataaaattaatagtggagatttaaaaggcagacttatccaaaaacttattaaaaatgatatatcactttattctatgcatacgaattttgatatagcatttgatggtctaaatgactattttatggaaattatggaatttggtaattcaaaggttttagatataactaaaagcgaaaatttgtataaattagcagtatacgttccacataactattcagatgaacttagaaaggttttaagtaattcaggagcaggtcatatagggaattatagtgattgtacgttttcaatagaaggtgaaggacaatttaagccattagaaggctctaatccgtttcttggaagtgtaaatgatatagaaactgtaaatgaagttaaaattgaaactgtagtaccacagaagcttttaggtggggtaataagttctatgttagatgcacatccttatgaagaagttgcatatgatttgtacaagttagaaaataaaggtgagatatttggactaggtagaataagtaaacttgataaaagtatgacattagaaagtctttcaaggaaaataaaagagaaattaaatatgaaacacataagagtagttggaaaccttagtacagacataacgaaagtagccgttgtaacaggagctggttcagaatttgtaaaaaaagctaagagacaaggtgcagaagtactaattacgggtgatgtaaagtatcatgaggcacaagatgcacttgatattggaatgtgtatagtggattgtggtcattttgatacagaagatatattcaaaaatgttatgaagagatttttagatgaatttagtgaaattgaagtaataaagagtaatgtatatttgaatccatttagtactatttagaagtgtttgattaaaaaatactatataaaaaataaatttgagtttaattagggggataatgatgaaagtagcagtaatttttcatagtgtttgtgggagtacatatttattagctagagaatataaagaagtgcttgaagaaatgaatatcgaggtagatatatttagagtaagtgacgaagttgcaaaaacacttcctcaatattatttgataaattacaaagaatacaaagacgaatttgaaagtataaatgtaattaaatctggaaaagaaatattagattatgatgctatatttatgggttcaccaacatattatggaaatgtatctggaccaatgaagatgtttatggatagtttttctgatatttgggtaggtgctcctttgagtggtaaaatatttggttgttttgctacagcaggttcacaacatggaggaggagaattagctttgcaagctatgaatatatttgctcaacatatgggaatgactcttttgtcagttccatgttcagtaagaggaggttatccagcgtatggaatacttcatatagcaggagataattctgatataagaccaaatgatgatgccaagataggtataagagattacctaaaaagacttaacatataagaatatcatataaaaatacctaaaagtagctgtatatacttttaggtatttttacttaattatatacgtgaagctttaccagaaatatggtcaatttctattttaacaacagttgttaagttcatatccttctctatgtacttcatgccttcttcaaagaatcctttagaatatttttttattatttctacaagagcatttttcttttcttcattttctacagtgcaagcttttccaaaaactatagcactagaataagtagtactaaatttatctggaataacactttcattagcaactactaaaaaagaaactttgttgtttttcgatatattatctaacttatgtccatttcttgcacaatgaaagtaaatagaatcattaaagtatacataatttacagcaactccataaggataaccattttcagatatagtggaaaaagtaccaaattcaccattttttaatacttcaacagtatcttcttttgtcatttctctttttttcaatctcatttctttaaacataatatcatcctttctaattttgatgcttaaattaaattttagcacatttataaagattatgctatgttttttacaaattttaagaaaaaaatatagtttaagataaaaggtagtgaaagagaagctatttggaggtttatttatgatattattgttagagtagtacaaacaatactaataaatttaatagctggtttcttgttatttaaggtagtaagcatgtctataagaaggggaagttatcgagggtagaagttgttatttataacgatattataaagaaaatattattatataaaataataaatagtaaagaggtatcaagttgaatataatacttaatacctcttcaaaattaaattataaaagtgttgtgggaattgtcctatacatggtaaggagataataaagaatgtatctttaaagtctcaactaaacagcaaaatttatccaacaaacatacaataaatgcttctttgtatctaggtggcttaacagtaagtggccacatgtgttttaaaattatgtccgtttctttttcatttatttgaaaaaataaagttgcattttttaatgcttctctagggtgagtaaatccatgtaatccttttctatcacctttgtaatgccaatcataaagaaaaaagtcgtgtagtaaagctcctctaataacactttgaatatcaacacgtaagtgcaattttttacataatagataactataatatgctactgacaaactatgttcaagacatgaaacattgccatgatgaggaaatgttctcataagttgaactttttcagaagaaagtatctcagaagcacattcattaaaatatttgatttcagcttttgacaacattatgaaaatctccattcttagtaatatataaatactatacttcaacgataatatgaaatatttcttatcctacaaaatataatacccaataatacaagtaagataccttttatggtattttaaagtaagagagattttattaggctaaacaatgaaaaaattaaaagtaaagctatagcaatatatagtatttttccaagaggattgccaaaatttatagtccatccaataccaaaccttttattaaccattaatgatgggtcatttggattattatacatgatgcctgctatccaatacttctcatcttcttctggagaataagatgagttgaattttaaatttggggaattaatatatgttgctattaaataaattataactaaaagcgttgtaatattcatagcagttgatagttttgtttttattgataaaagagtagtaaaaaactgtgttgtcattataatcatcaatattaaaaacaaataaccaattttatttaaatatttaatgttttcaactctactttcttcaattctatttgtatctatcttaatccttgactttatggatccaatggaagttatatataataaaaccattaaacaaaagtcagtaccgattaatttaaatacattaagaaatgatttatctataaaaacatcaggagacccatttatgttccaatgagtggcaattgagtctggcaatttattataattaaatgctataaaaatactcatccccaaagtaaatagtatcggtattaaatagattattttaaatttttttattattttatttttcttatttataaaatccatatctactattaattttgaatctacatctatatgacctaatttagaataaatttctgatttaagcttcttagcttttttatgtgtatgaatatatagtatactctcatataataaaaaacctataataccaataaaatatgaaagttccaatttattaaatgtaaaaaccagaataaaaactaatataaagtctataataaaacctaaagataatagttttttaaattctttatctaattttataaagtaattataatttttatgctcttggtctatagaaactccatagatgtgttttttacctacaaaatagggcataaaataaaatgtagcatacatcaaaattagaactggaaatattgtaaatagacattcaatcttactcataatatttcacctcatacttgtcaaataaacttgaacttagtgacaaaaattcttctttactaatacctgataaataagattttgccaccaataattccaagtcaagtttatttttttgacgagttgtattatctattttcattggtagttgagctacaatagcaccttttcttctatcaatatttaagaatccctcttcttttaactcattgtaggatttgttcactgtatgtaaatttacaccaatattttctgccatacttcttacagatggaagtgattcatttattttcaattctcctgaagctatagccttagttatttcttctttaatttgtacataaatagatttatcactattaaaatctaaatttaaaaccataaaaaacctccattatgctttataaatgaaaacgattgttatatacatagtataacataaaaaataataacaaacacaaaatataagtttatattttgtaaaaattgtaatttaaaaaataacataatttttattaaaataatacagatactatttatagatagaaataaaaattagaaaggagaaaaaatatgttaacatatttaatgaaaagacaaatgcataaaaaagatgatggaatgagtaaaccaatgatgattacaggagctgtaattacaggtgtaggagcatatgctgtatacaaaatggtaaaaagccataaatctaattctcaaatggtcaatacaaattattatggaaatagcgattatgatgattataaatatgacgaatttgattatgactgtgattgtagagacacaaaacaagattatgaatatgaagaattaaaaaaaaaagtaaaagaatttaattcaagaagaataaattgtgaaaattgtccacatgtttctcaagaagaaatgatgcaatatgtaaatagtgttaaagatgtaaaggaagatattgatttacatgaagatgctaaaaaagataatatttacaaagaagatgaatacaaaaaatatgaagaagaataagtaatattttgtataactgaacaaatagtaatgtcaaattatttaatatctagttttaatatgtaagttgtaacttaacttgaaagaatcagtatcattctttagatagttaagttacaacttacattttgtttttataaattttaatagttctttgtgactattttgtaattttagaaatattttagtatccagggtaattgtgtataataaaacttgtatagatagatagtatgaaattaagcagatagtttaaaattaaaatgaaaagaaaggaaatagttatgttaaagttgttgatagttgaagatgatagtactatatcttttggaataaagtatgctttagaacaagaaggatttagtatagatatatcaaaggatttatctagtggaaaagaaatgatttcttctaatgaatatagcatgatactgttggatgttacattgccagatggaactggttatgagctttgtaaatatataagaggattctctcaggttcctataatattcttgactgcttgtgatgaagaagtaaatattgtaatgggtctcgatataggtggagatgattatataacaaaaccttttagaattagagaattaatatccagaataaaagctgttttaagaagaaaaggtaatacttcagaagaaaataagaaaatacttaaatttggagatttaagtatatatacattagaagctagagtatataaaaatgataaagaaatatttctgacatcagttgaatataaacttcttttaattcttatacagaataaaaatactgttttaagtagaactcaaatattggaaaaactttgggatgtaacttatgattttgtaaacgacaatactctaactgtttatataaaaaggcttagagaaaaaataggtgatgatttatgtgaaccaatctacatagaaactgtaagggggattggttataaatggataggaagtgaaaatagtgtttctatataatccagaagtgaagaagtttttaagtaagtatgttactttgatgtttattgttatcataatatctattggatttagcataatcaacgtgtctttaactaaagagatggttgtaagaaataatcaagctataatagggactttatcgagtaagtatccaaacttagaaagtcagatagtagacataataactcaagggaagtctatgaagaacatagattatggtcagaaaatattaagtaagtataattatgataaatctattaagataaactctgagcctattatttctaaattagttttagagactatcaaaataaatataatattagtatgtataatatttattttgatatttgtgttggttgttagatattttacgtcaatttacaatgatttatcagatatgactaagtatgtttactatagttcagagggtaagccatttgatatgaaaaacaagaatcaagaagggcagataggtcttctaaaaactgaactcttaaagatgacgacaattcttaatgaaaaggttgaacttttaaaaagagaaaagatatttttaaacaatacaatttccgatatatcacatcaattaaaaactcctatgacttctttaataatgttgaatgatttattatataatgatgtaccatacgaagtaaaaatcgattttttaaataagataaaaaatcaattaaatagaatggattggttgattaaaagcatgcttaaattatcaaaggtagaagcaaaagtgataaattttaaaaaagataaggtaaaatttagtgaactcatacatagagcaatgctatctatgaaaatacctatggagattaaaaatcaaaaactgactatagagggaaatgataatgtatcttatattggtgatattgattggtctgtggaagcactagtgaatataatcaaaaattgtgtagaacatactcctgaatttggaaatataattataacctataaagaaaatccattattttctgaactaataataaaagatgagggtgaaggtatagataaaaaagatataccacatgtatttaaacgattctatagaggaagaagtagttcaaaagaagatagtgtaggaataggtcttgcaatgtcaaaatctataatagaaagccaaaatggcgatatatatgtaaacagcgaaaaaggtaagggtacagaatttcatataatatttcataaaatgtatgatagtgactaatctgtaatatttaattcactttatagtaatagccaaaacctaatatatgaagtatagaatataaatattggaggtagttatggaaattttaagagtagaaaatctaactaaaagttatggtaaaaatgaaacaaaagttgatgctataaaaaatgtaagtttatcagttgaaaaaggaacgtttatagcaataacaggtccaagtggaagtggtaaaagtaccttattacatttattaggaggagttgacagaccaactagtggtaaggtttatataaatgatgttgatatatataatttaaaaactaaggatttggcgatatttagaagaagaaatataggtcttatatatcaattttacaacttaattccagtcttaaatgtgaaggaaaacatattgcttccagcagagcttgacaatagagatattgatagagaatattttgatgatttaatgaaaacattaggtctaattgatagagaaaagcaccttccaaaccaattatcaggaggtcaacaacagagaacctctataggacgtgcattaattaatagaccttctataatattagcagatgagccaacaggtaatttagatagtaaaaattcaaaggaaatattagaattgttaaaattgtcagtaaaaaaatacaatcagacactaataatgataactcatgacaaaaatatggcacttcaagctgatagaattataagcatagaagatggaatcataaaaagtgatgaggtgatgtagatgaatttatatacatcactaaccattagatacttaaaacaaaataaaagaagaaccattgtaaccataatcggtataatactttcaacagctttaatttgtggtataggaaatatatttgaaagttttatggattatcaaatgagagaaactataaagaatgatggaagtttccatgttacattttatgatgtaaatagaaaaaatgtggaatatgtaacgaaatcagctgaaatagaaaaacatgcatttaccaaacaacttggatattctaaattagaaaatagtgaaaatgctatattaagtataaagcaatatgatcaaaatgcaataaacggatataaagtttctataaaagaaggtagatttccagctaaggaaggagaaattgttttaagtgaaagtattattaatcttatagatgataagttaaaaataggagataagataactttaaaagtaggggatatgtttgactcaagcaagaaaaagattgatagtatgacatttcatgaaggtgattatatagcaaatgaaaaagatagaacttttaaagttgttggtataattaaaaaacctgggtttgaacgttataatggaattgcaacagctatagcctactttaatcctatgaataattacaatgatacaattaatgtatcagtagcagtaagaaatcctaaagatgtgtataagataagtaataaaataagtaaaaatatatattcaaataaagataaagaagcagtttctgatatgataaaatacaatgaacatttattgaggttacaaggtgctagtaagtattcaaatataaatagctctataaagtctataattatagcagtaactattttagtaatcatatgtacaattgctacagtgtacaattcctttagtatttctataaatgaacgaaaaaaacagtttgggatattaaattctataggtgctacatctagtcaaattaaaagattagtttttatagaaggtattataattagtttaattggtataccaataggactaatatctggaacagtagctatagacctattgtttaaaattataaataagtattttactgaatcggttgttactaagatgagtttgcagatagtgtataatccaataataattattgttagtataataatagttttgcttacaatctttatatcaattctactacctgcaatatcggcttctaatatttctccccttaatgtgattaaaaatactggagagtataaagtgggcaaaatcaaaagctcaagacttattaaaatgatttttaaaactgaaggagtacttgcatataaaaatattaggagaaatagaaaaaaatttataataactcttttttctttaatggtaagtataataatatttatatcttttagtggctttacattacttttactaagaggtgaagaaattagaaattctcaaagaaaatatgatttgtatttaactgcaaagaacacagctaggtctgtagaggatactataagtgaactagaagatattgatgggataaaaaactttgaattggcaacaggacaatatgtgtctataagagtaagtgaaaataaaataaataaatccaaggaagatttaatcaggaaatattatcaaaaatataagattggagaaagttatgaatatgatttcagtaataatgaattgatttttccgggagattttgcagtaaaaaacaaaataaataacttagtacagggctcttttaataaagagagagcaattgaagaaaatggtgttatattagttagaaaaagtgcaattgaagaaaatgggaagaaaggtgtagtagaacttaccaactataaagtaggagatacagtaaattgtgaatatcttgatgaaaatgccttaagtaaaaaagtaaaggtcaagattcttgctataactgatgaagaacgtctaggttttggttatcaaaatatggggttacaatttataacttatgatgaagttgctaaaaatttaaatttaaaattaagtaaaagccttatatttattgattcaggaggaagcattaagactaagaaggaaatagaagctttggcaaataaaaatgattttaacttttatgatgaaatttcaagcagtgaaagtgaaaaacaagatttaaaggttattaaaatatttgtatatggttttatagtagtgatatctttagtgagtgttacaaatattctaaatacagtaagtacaagtataaatctaagaaaaagagaacttgcagtaatacaatctataggggttactcctaaaggatttaggaaaatgatatatttagaaagttttatatatggtatactgtcattgttgtttggaataccaattagtattggtataattctaattatgaataaacttatttcaggtgtaattgaattttctccgattataccgtggacagccatagttatctgtatagtaagtgtttttataataacttttatagcagggtatataccaatgagtaaattaaataaagaaaatataatagataatataagaagagaaagtatatagatataaaaataattcttaactatataaaatattattaaaatcatttaagtggtataaaatattattatatcacttaaatgattttttatttatataagaaatctaataataaattactagaggtatttaactatttagaaagaattggtattatataaagtaagagaatatataataagaaagaatatttgattttatttgaaaacaaaagaaaaagaaggtgattactatttctcatataactgcgaagaatatgtataaaagtttagaggaaagaataaacaagtttccacaaggtgctccaccatctgatacattatacaaaatactaaatgtactatatacagaacaagaggcgaagttagttgctcagcttccaataaagcctttcagagtaaaaacagcagctaaaatttggagtgtaagtgaaagtgaagcatatagagtattggataaacttgctagtaaggctctgatactagatatagaagataataaagggaagaaatatataatgcctcctccaatggctggtttttttgagtttgccatgatgagaacgagacacgatatagaccaaaaacttttggcagaactttactatcaatatatgaatgtagaagaagattttatcaaagatttattttattcaacagaaacgaagcttggaagagtatacgttcaagaggaagttttaactaatgataatgaggttagtattttagattatgaaagggctactcatataattgatgaatcaactcatataggtataagtatgtgttactgtagacatagaatgcaacatgttggaaaagcttgtgatgctcccatggatatatgtatgacgtttgacaatgtagcaaattctttaataaataataaatttgcaagacgtgtggataaaatagaatgtaaagaactacttcatcaagcatatgaacataacttagttcaatgtggagaaaatgttaggaaaggggttacgtttatatgtaattgctgtggatgttgctgtgaagcaatggtagcagctaaaagatttggaaatcttcatccagtacagacaacaagttttataccaaatataaaccatgaaaattgtgtaaagtgtggtaaatgtataactgcatgtccaatagatgcgataagcaaggttaaggaagatggtaaagaatatataaaaattgatgaggatagatgtttaggttgtggagtttgtgttagaaattgccataaaaatagcattatgttattaaagagagatgaaaaaataataactccagcaaattcagtacatagagcagttctcatggcaattgaaaaagggcagttacaaaatttaatttttgataataatgctctggctagtcatagagctatgggagctatactgtcagctatattaaagcttgaaccagctaaaaagattttagccagtaaacaattaaagtcagtatatttagataaattgttaagtatgaatgataaatagaaactaacttaaaaaaggcaaagttttagacttatctatatcttaataaacttatcatttaatatttaaatttaatttttacacatataaaacttataacttaaataaaaaaaggctatattcaattaatattacttgaatacagccttttttagttatgttaagctatttcttttatttgcttaaatgagttttcatttccatttccaccaatttgtgttacagatttaaatctcatagttttaaatagttctttttgattataatctagtgagtttcctactagcattacaggagatttagtttttccagccaaaactccaacagataatccgtctattaaatcatcttgtttattcattccatttttagcaacatataaattgtctatcttagaatccttgtaaaattcttttattacttttgcattagtttcatttctagtgttacctgatattctctgtggattttgaagtttactttctatatttttagaaactgtatattctccaccgattacataagatttatcaatctttttgtttttaaataagttatttatttcagttatattactattttcattagtaagtattataggcatatcattttgagctgatacagctccaatgcttactgcatcggctaatcctttttcgccattaactactgaaatctttgatatattgctaatattgttcaattctttagcaatgttcatagaagtttgatatctatcacttcctgaaattctagatacagagatattgtttgattttatagtatctaaagatttttcatttatagaagcctctccaccaactacatatacatttttaacttttaatctctttaattcagccaaagttttttcatttatttgagagcttccagtcaataatataggagcgtttttcttgtatgcaaatggtgttgcggccaaagcatctgcaattgctgaatcgtttattaaaactgcattttcagcattttcccaacctgcttgacttatcttaatagaagtttcatatctatcagttcctgtaagtgcacttgcatttacttcatcttgatatgtaacctcaaatctagcatttggacttcctaagaaaacaattacgcctccttttggcaatctaactctattgttctttgtaactaaagaatagtttacaggaacacctttatcatcataaacagcaaaagctgaattttgaggaagattaacttctatttttttatttgcgatatcgtcaccaatcttataccattttgcataaccattggattctagttcacaagtaaaagatttttctgctggcaaattagttatagaatcttcactaacatacgttagtgttccaaaagataaatactctgtaccattttctttatgaagtttaatgtcggataaatcacgacctattacaccaggtatttctataaaagcatttgagttattctcatccattattttagtgttaactatataacctggagtttcatcagaaagactaaaacttgcttttacagagccaaacatatagctttgagaagtatatttttcatccactagatagtaacctttgccacttctttttttccacacttctttgacactatttgatatattgttgtcatctactttttgagctacatagtataaacttgctgtctgacctaatccagggacatcatcataagagctcatatttaaatatgtgatattatttttttcttttacaaattttaaacaactgttacccttttcagatacaaatctatcttgacctatgtatacgtatttatcttcaggtccattttctatataaggagaagatactgttaaagtaccattatcattaacatctacttttatcatatttgaagaagcataaagaccactattttcttttagagagctaggcattttaacttgttgtggcttactaaatgttttatcaggttttatttctttaattttacctttttcttttaatgcagatagtaagatttcttgtccaattatttcgttaagttgactacttccaccagaagaaagaactgcaactgccatattttcatctggaagaactataagattactgtggaataataaagagtctccaccttttgtaagagcttttaaattatactgattaaatggataagtgttgacacaatcccaccctaaaccatatccaagtatagaatcttctccttcaggccatagaccatttaaatattctttgttttccatagcttttactgaagcaggagaaagaataccatttgaatttttcataaatgtttgtgcaaatgtacatagattttctgcacttgaatataaaccacctgcacctatagcattaaggttatcttgtggaactgcatcttcccaataaggtacatatgcttttgctagttttgaactatcaaaactattttctgtagtttttgtattttgtaagttaagtggattatttatgtatttatcaagaaaattagtaaatgacataccagatactctttctactaaaatttcagctaaagtaaatccatcattacaataaacggaaaaagctcctggtttagcttttaatctttgtttttgtaattcttttaagaaattatcatgaccataagaatcattgtctgctaataaaatagtgtttttaaaactacttcccatcaaccctgatgaatgatttaataacattcttggagtgatttccttgtatctatcatcagccattttaaattcaggtatatactttacaacaggagtatctaaatttaattttccatcatcaaccaacttcataacagctgttgtagtaaacattttactgatagatgcgatactatacatattatccttatttaagtttttgttatcctgtttgctgtaaactccaccattaccagaaatctcaattttgccattatcaatcaaagcatattgagcacttacagcaccatactttgatagcaaagtttggattttctctttagcaagagctttagtttttgtgtaagattccgcgtttttactataatcatgtaattctatatcagaactttgatatttttcggaattatcttttgtattatcagcaaaagtaatatttggagcagcagtaaataacatactcaatactaatgtactagataataatttagagatcctttgcttaaacatattacattacctctttccctttttaataatttataattagcataacattcttaattattttaatcaacagattattatcaataaaaaaagcttttataagtatagctttttatataacagagaaaaatataaaaataatatttgttgttgtataaagaataaagggtataggtaatatataaataaaatggaggaattttagacatatgtataagaatataaataagaagcaacttaaagaaatgatgaaaaatgaaaaggatgttttattattagatgtaagaactaaagatgaatttaaggaatataaaatagaaaatgctataaatatatctttacaagatttaatcaataatatagatgaaatttacgattataaagataagaaagtagtagtttattgcagaagtggtcatagaagtgttactgcatgtaatttgttagctgaagaaggttttgagcatttatataatttaaattcaggaataattgattatatgagttaaataaggtaagttatacattaaatactatgtatagctctgtttattaagtaggaatatatctaaatatttataagataaatttaggaaagaacgaattttttcgcttttttctatgacagtttttgtagtaaatattagtttttaagttggaaaaaggtagtagctttttagctactaccttttaatatgaacttagaatattattaaaaaaatatatttaaagacagaattaattttttaatgaccagttaaattactatcgccaaatttatcattaaatggttttataactctatttataggtccttttagaagtacgtttaaacaaatagacagaatcataaatagtaatagaactagtatatctttagttagatttggagcatatataccaccaactgcttcccttgtagcacctattgcataggtaaatggcattatagggtttattctttggaagaatgtaggtgtaacttgtatagggaatgtaccaccagaagaaccaatctgaacgactaatagtactattgcaattgcttttcctacatttccaaatacagaaactaaagaatacactataaagttaaataccatactagtaaacataagcagaactatcaataaaattggatgttttgctgttactcctaacaataatatatctccagttcctattataaaaccttggacaagagctatacttaaaaaagtaagacctcttccaaagtaaatttcataaggtttatagtttccatgtacagatgtagacaatagtgctgaaataagtaatataccaacccatgtagaaagaacactataaaatggtgtcattgcagaaccataattttcaattggatataatttctctgttttcacctcaacaggttcttttaagaaattagactttgtcaatatatcactttcaagcaagctgactaattttttcatatcttcaccattactaattttgcttaaagtatcaatcaaatcatccaacattccttttgctaaaggaagtctttctcttatcaatgatatactttcctgtgcatttcctgaaagttttagagaagtagtaagtatttcttcaacctttggaagttttgcttctgccttatctaaaacagtaattatatcatttgctacttttatactgtttgcaaatatactatttataggttttgatatttttgagtcaaaattatttaaaatatttaaattaattcttccaataccatttgatagacttaaaacattattcaaagcacttatagatggttgttgtccagatataactttgtttttaatatcatttaatgttgatatagatgaatctattttattgctagagtcttcaagattatctattacatcatccaatctattatttgatgtaagttggtttaatttagttaaaaagtccaccaaagtatcgtttaaagattgcaaattagaaagtttttctgataaattatctatcaacttaggtacatcttcactgccactatttactgcatcaattaaatttaatgtaagagaagaagcagaagatgaaaggtcaaccattaaatttaagtcagacttaataagaggagaaagttcgtctaaattatcatttgtatcctctaagaatttttttaagtcacttgataatagttttgtatcattcagagtctttttaattgtaggtaaatcagatttaatatctttaactgtatcagataattttgaagtagcatcagaagctaaatccacagtcttatttatatggtcaaatctcttttgaaggtcaataagggaattttcaacttttgtcaattttggaagactgtgttcaattcctgcaccaactccgtttgatataccaagaacgatttcactaactgtttttactatagtctgattaacctgtagttgtattgtagaagcacctttatctgtaatctttggtgcaactgcatttattttttcattaacagtatagataatttcgccttttttaacatcatctgtaattaaagatgtcaaatcttttgtaaaattttttggaatcttaagtgatgcataataagtaccttttttaacaccttcaagagcagttttttcatctacaaactgccaacctaaactcttgttatctttgagttgttcaattaattggtctcctacattaatcttttgtcctgctatttcatttcctttatcttcatttgttactgctacaagcatattagcagtgcttccataagggtcccaagatgcctttatattgaaccaagcatacagagatggtaaaaaagcaagacctaaaactattacaagtacggcataattgccacgtatatcttttaggtcacttttaaaaatttctaatatattttttaaaccctttgaaggtcttaaattcttgatattattccagtttaaaatttcttttaaactattagtttttttcaaatgtctcacctcctaaaatattttgataaagaaaaaagttagatttataatcaattttaaattatattactttttacacaaatagtaaagttaaaattttgtcttaattttaatacatatatattatatataatagtatgctataaatatatataaatataggaaataaaaacaaataatttataaaatatatggtataaaaattaataataaatcaaatatttataattgatataatcaattaaattagccattatgatatacttttggtaatgagaaaattctatgaagggatgattgaatgaagtattttaaaaaatacataaaaaaatatatagtattatttctaacagcagtattttttttaacattggaagctttttgtgatttagctcaaccaactataatggcaaaaataatagatataggggtttcaaataagaacctagactacatactatcaacaggagctataatgataggtataacttttttaggtgcaatatttgcaataataagaagtgtaatctcggcaagagtttctcagcatttttcttatgatttaagacaggatgtatttgaaaagataaatacatactcattaaaacaaatagataaatttggtagagcttcgttaataacaagaattactaatgatatcaatcaaatgcaacaattcgttaatggaatgatgagagtttttataaagtcaccaataatgtgtataggaagtttaattatagctataaaattaaatttaaagatgtcaataattattctaattgcagttttaattatatttattataatattgcttaatatgaagatagggtatagattatttaaaaatgtacaagaaagtacagataaagtaaattcaaaattaagacagtttttaagtggaataaaagtagttaaactattttgtagatacgattatgagaaccaaagctttgaagagttaaatgatgaactttttaaaaatagtagaaaagctacaactatgatgtcattttttagaccgacaattacaataatcattaatgtttccataataataatattactgattggaaggcatttaatttattcaggagaaattaaaattgggattatagttgcttatgtaaactatatgactagaatattaacatctcttataatgatttcacatgtttttaatgtttttgttagggcaaaagcatcttatgagagaataagtgaggttttggttgatgagaatgaagaagtaattgagagagaagaaagtttagatgttggagaaaaagatttaaagtttgtaaattgtgatataatttttgaaaatgtagatttttcgtataacaaaaatacagatgaaaaaatattaaaaaacgtatcctttaaaatagaagaaggtcaaaatattggtgtgattggtcaaactggttcaggaaagacttctttagtaaatttaattcaaaaattatatataattgataaaggtgatattaagattggaggacgtagtatatacagtatttctgaagaaagtttaagggaaaaaataggtgtagtatttcaaaatagcagtgtgtttggaaaaagtatactagaaaatatagttatgggaaatgagggtataagtagagaagatgttataaaatcatgtgagatagcaaatgcaaatcaatttataactaaactcgaaaattcttatgatgaggttttatttcaaaggggtaaaaatttatcaggaggacagagacaaagaattactatagctagagctatagccaaaaaaccacaaatattaattcttgatgattgttttagtgcaatggatattaatacagagacaattataagaaagaatataaaagagtatataagtaatttaagagaaaaggaaagtaagaaatgtactgtaataactatttcacaaaagattagttctataattgactgtgataagattttagtcttggatgagggtgaggtggttggatttgctacacatgaagatttactggttagttctccaatttataaaaaaatttttgcgttgcagaatttagtaagtgaagatgtaaattaaggaggaagtatattgaacttaagtactggaaatcaaaaggtcagtagattaaagaaaaaagaaaagcctaaagattttaaaaaaacgtttaaaagaatttttatgtactttaaaaaagataagaagattactagatttatttttttgctagtaataattgattcaattatatcaactgtaataccatatactattggaaaggtagttgacataatagatatcgatacttattcaaaatccattttcttaaaaggaataattattttactttcattttatataattgagttttcagttaaactgtctaaggggatatgtacagctagattatctcaaagtatagttaaagaaatgagaagtaatttatttttaaaatttaaaaatctaccaataaccttttttgataaaagttctactggagatattatgagtagagtgacaaatgatgttgataatatcagtacaggaatatcaaattcattagtacagttaattacaggaatcttaaacatattgatgacttttattatgatgtttgtattaagcccaattttaacattttgcagtgtaatattaataccgatagtaatgtttgtgagtaattttattgcaaagagaactagagttttttttaagcaacaacaagttgagttgggaaaactaaatgcacatattgaagaaatgatatcaaacataaatgtagtaaaatcttttaattatgaaagaaaatctgtaaatgattttaaagaagtcaatgatagacttctaaatatttcccttaaatcgcaaatttacacttctcttttaatgcctattatgaatgtgattagtaatataggatttgcaactatatgtattataggaggtgttcttgcatctaaagatattataaccataggggttatagctagttttttaagttatgtaagacaattcacaagacctttaaatgaattagcaaatctatttaatacattactttcagccatagctggatgtgaaagagtttttgaaattatagatgaacaagaagagcaagaagtgcataacatgtttaaaagtgagattaacgataataaagatggtaatttaaactctcattttgtaaagggagaaattgagcttaaagatgtaagtttttcttatgattcaaaaaagaaaattttagataatataaacctaaaaatcaaagctggcacatcaaatgccatcataggagagacaggaagtggaaaaacaacgattataaatctaattacaaatttttatcatatagatgaaggaagtatatttttagatggtaaggatatatactctattaacagaaactatttgagaacttgttttggagtagttccacaagaaggttatatattcaatgatacagttatggaaaatataaggtatggaaatctggaggctactgatgaagaagttatatatgctagtaaaatagcaaatgcacataaatttatagttaaaatgcgtgaaggatatagtactgtattatcggataggggtgaagatttaagtgaaggtcaaaaacaattaataagtattgctagagcagtattaaaaaatgctccaatacttattttggatgaggctacaagtaacatagatatagcaacagaagctaaaattcaagaagcaataaataatttaacttatggaaagacaagtataattatagctcatagattaagtaccatatcaaattgtgataatataatagttttagaaaatggtagaattgtggaatcaggaaatcataaagaattgataaaattaaagggacattattatagaaacatattattgacacagggaaaataagtatttagaaaaaacttttaaaaaaattgtttaaaggtatatggtgcgggtatatatagactaacttaataaataaaaaatttaatttgatatataaaatttaggaggaaagtaattatgaagaaatttgtttgtacagtatgtggatatatacatgaaggagatgctgcaccagcacaatgtccagtatgtaaagttggagctgataaatttgaagaaatgaaaggcgaaaaaaattgggctgatgagcacagaataggagtagctcaaggtgtagatgaagaaataatcgaaggattaagagctaactttgttggtgagtgtacagaagtaggaatgtatttagcaatgagtagacaagctgatagagaaggttatccagaagtaggagaagcttataagagaatagctcttgaagaagctgaacatgctgctaaatttgcagaacttcttggagaagttgtagttgcagatacaaaagaaaacttaagagttagagttgatgctgagtatggtgcaactgatggaaaattaaaattagctaaaaaagctaaagaattaggactagatgctatacacgatacagtacatgaaatgtgtaaagatgaagctagacatggtaaagcattcttaggattattaaatagatattttggaaaataaatttaatataagttaagtagatttttaggagtatatcatttatgatttttaaaattataatgatatgctcctttttaatagttgtattttatattttttatagctataatcttgtaaatatttaaatcattataaatatagttttaatgaaattaattttttagttttattatctctgatttatgtaataaatagaattaatttgatttaaacatatatttatgataaaatatgagaaataaataagaatttaattagaaaggagtatttatagtgtttaaaactgtatttgaagataaagaatatgttttattatgtaagaattattctaaaagtgatggagtaaaagcaatatttatttatttgatatctatgttactattgtttttccaaggttatttgtatacaacaaatttaagttcaacaattttaactaactcacaaatgatattgtcaatcttgattttacttatagggctgggatttgtactactttcgaaggaaaaactaaatacgattgggattacaatgtgaaatttaaataaaagtcttttgtatggagttattggtgctactgtactcgtaattttcgttattttaacagctggaattatgcaaggaaaaaaagttgattttcaattacctactgtttttatgattgttacatttattgtttctgctatttcagaagaaattgtttttagagggtatattcaaacaaggttaactggattaataaaaaatagtgtactttcatcttgtattaatgcttttctttttctatctacacattaccctgtaaaatggatttcaagtggagatttttcatttgcaattctatctggattttatgtgatatgccttatattacttaacttttcatgtgatttagtatatcgaaaaactaactgtctgtggggggcatggctactgcatatcttgtataacattggcacaggagtgctgatttttactacttagtcaattttactttgcagaaagtttatcgtaagaaacggattattttataagtcaaattttagagctagtaaattgacatacttaaaataatttaaactagatgtaaaaaatatcgacaggtggtggacaatctgattaagtatatacataaaagtaatatagctattgttgtactgcatgaaatttatggagttaataattttataaaagatgtttgtcaaaagtattataaaggtgggtatgatgtgttttgtccagaactcttaggagaaaaaagagttttttcatacttaaaagctcaagaagcatatgatttttttataaataatgttaagtttgatatttataaaaaagtagaaaaacttataaatggtttaaaatcggagtataaacatgtatttgtagttgggtatagtataggtgcaactattgcatggagatgtagtgaaaactctttgtgtgatggtataatttgttgttatggctcccgaattagagattatatggatgtaattccaacatgtcctattttgctagtgtttgcaaaatacgattcattcgatgttgattatgtttcttctcaactttctagaaggcaaaatattcaaattgaaattttagacgcaaatcatggttttattgatacatactcaaaaaactattctaatgctcaaacagaagtttttaatattaaagaaaaaaactttctatctaaatgtttaggctaatatgttttattataaaatatagaaaatttaatcaatttgaaaaacataatgacactactaatgttaaaaaatattagtagtgtcattatattttttgagatagagatagtcagtagaatcatagaattaattatgtttttatgattgtattagattaatatttaaattacattgaaaagaaaaaaatcattactatagaataatatctttatcaaaagaacattcttatgcagaatatggttatgagtatctaagagaaatctcaaaatatataggatagcagtatgaatttttatagattttattaatacaataaatcaaatgagaaaaaaaatcaaaagaatacaataatcacttgcaaaaaatatgctattgtgatagacttaaatcaaaattaggaattgtaagaataaggaaaaagataagtaattattttaacgagtcaaaatttaagaaattgtgatttatatataagatagaggttgtttgtaaatttaaattggttgaagaggaggaatattatatgatgccattgatattatcaaatacaggtgaagaagtagttataaagaaaatttcgggaagtgataagacgaggacttttttaaatagtataggttttgtagtaggtacaaatgttaaaatagtttctaagatagatggtaacttaataatagacgtaaaagatactagagttgcattagataaaaaaatggcaagtagaataataatatagggaggtaatgacatgaacagactgaaggatattaagtgtggagagactgtaaaagtcaaaaagttagaaggagaaggagctacacgaagacgtataatggatatggggattacaagaggtgttaatatatttataagaaaagtagctcctcttggtgatccaattgaggtaacagtcagagattatgaactatcaattcgtaagtcagatgcagaaaaaattattgtggaataataaagattaattagagtagggttaatgtaattatataatgagaatgattttctgtatcacaaacagtgatgtatttaaataataatggagggaatggaaatgtcaataaaaataggtctcataggaaatcctaactgtggtaagacaacaatgttcaatgggcttacaggctcgtcgcaatatgttggtaactggccaggagtaacagttgaaaaaaaaggtggaaaattaaaaggaaataaagatgtggaaatagtagatttaccaggtatttattctttatctccatatacattagaagaagtagttacacgtaattttatgctagatgataagccggatgcagtaataaatattgtagacgcatcaaatatagagagaaatttatatcttacaactcaagttttagagctaggtataccgaccattatagctcttaatatgatggatattgtaaataagaatggtgataagataaatattaaagaactatctgaagttataggttgcccagtggtagaagtaacagcagttaaaggtcaaggaattatggaggctgctgaaaaggcagttgaacttgcaagtagtaacaataaattaaatttcaaattaccttttgttgatgaaagtaaggacgcaatagaaaaaattgaaaaaataatagaagaaaagactccatatatagatgtagaaacacgctggttagctataaagctatttgagagagatgaaaatgttatacaaaaacttgatatttctaaaacaatattgaatagtattgaagaaataactagaaattgtgaagatgaattggatgatgatagtgaaagtataataacagccaatcgttatgaatttattagttcaataatttcaagtataataaagaagaatcgaaaaggtaaggaaactgtatcagataagatagataagattgtaacaaatcgtatactagcattacctatttttgcacttataatgtggggagtttactatatagcagtaagttcattgggtactatagcaactgattggacaaatgatgtactgtttggagaaattattcaaggcaatgtaagtaattttctagcttctttaaatgtagcagagtggttacaaggacttgtagttgatggtctaattggtggagttggagcagtactaggatttgtaccacaaatcatgcttttattcttattattgtcaatattagaagattgtgggtatatgtcacgtgtagcttttataatggatagaattttccgtaagtttggtctttcaggaaaatcatttataccaatgcttataagttcaggttgtggagttccaggagttatgtcaactcgtactatagagaatgatagagatagaaaaatgactattatgttaactacattcattccatgtggagctaagattccaataatagcattatttgcaggggcattatttggaggtgcttcatgggtagctccatcaatgtatttcttaggtattgcaatgataatcatttgtggaattatattaaagaaaactagtttatttgcaggagaaccatctccatttgttatggaattacctcaatatcatgttccaagtgcaaaaggtgttttaatacatatgtgggatagaggaaaagcatttataatcaaagcaggaacaattatatttgttgcttgtggagtaatctggttcttacaatcatttaattggtcattacaaatggtagatgctggagatagtatattagctagcttaggaaatatagttgcaccaatatttgctcctcttggatttggaaattggcaatcatcagtagcaacagttacaggtctagtagctaaggaaaatgtagttggaacatttggagttttatttggtatatcagatgcaacagagcaagacccaacacttcttgcttcagttgcaagtatgtttacagtagctagtgcgtttgcatttatggcatttaatatgctttgtgcaccttgttttgcagctattggagccataaaaagagaaatgggttcatggaaatggacatggattacattaggattccaaactttaacagcgtatataattgctcttcttataaatcaagttggaagtttagttttaggtactggaggaagtattgctggggcaataatatctatatttatagcagtagcagtagtctttgtagttttaacttattcaaataaaaatatgaaaaaagaaaaaatgggtaaattaagttatatgaaaaattaattcatataaataaggagtgatgaatatggctacatttattatagcagctattgtagtagtattaatggcactagctgtaatgtatatggttaaaaattcaaaaaagaatggtagcagttgtggatgtggttgttctggatgctcaagtagtaagagttgtcatagcgctaagagataaataggataagagcctgataaaaagttaaattgctttattatcaggttcttattttttatataaataacaaatttcatatttgaagtaggttagactatgctgtaattttactgtataattatatataaatatatgattaggagggattattgctaaattaagcaatataagtgaatattatgtttaaatttgatgttacaaacgagcttatgtgtatagcaaggggaagtggtaaattttttgcaaaaaaaggtgctatggtagcctttaaaggaaattttaattttgaaaaattgctgttaggtccaagtaatggcggtggattgggaagagcattattaggtcatgttcagaggtcattgacaggagaacaaatgccaataatggtggttgaaggtgaaggtgaaatttacctagctcaaaatgcttaccatgtagatgtaatatcaattgacccaggtgattccatttatgttgagagtgaaaacttattggcattttctgaacaattaaattacagtgtaaaattgattggttcaggggtaatatctcaaaaaggtctttttactacacatttagtaaataaaacaggtcaaaatcaagatgttgctataataacagatggtaatcctctaattcttgaaggaccttgttgtgttgacccagatgcattagtagcttggactggaagagaaccatatcctaaagtatcaaaactatcatggaagacttttattggtcagacttcaggagaatcttatcatatggaatttgttgaacctggacaaatagtcattatacaaccatctgaaagattgtctggcttaaaaacagattctacaccttctgatagaatgagttcaggtggattaagacttggcatagattaaatcttatgatatagcttaattattatttaagatattaaaaaataaaaagggtagcagggatagatatgttaaaaggagttttatatgtttgagaaaattcataaaaggtttaaaggatattatatttttttaataattttaattttatggaagatagtatgtgttttgggtatatggagtagctatattctgcctcctcctgaaatagtcttagatacttttataaaaatgatatatgacggttctattttcttaaatgtttatgccagtgtaagaaggatattaataggttttttaataagttcattgatggctataccacttggagttgtatttggagtaaataaaaaaatgtatgaatatttcaaaccactatttgaatttatgcgaagtacacctccactagctttggtgccaatgcttattttatggtttggtataggtgaagaatctaaaattataattattattttggcatccttttttccaatatttttaaatacattgaaaggtataaaaaattgtgacaataaattaatagaagtaggtaaatcttttaatttatctaaaaagagaattttttataaaataataatccctaattctatgctggatattgttgttggacttagtttagggcttgggtatagttttagggctataattggagcagagcttattgcagcttcttcaggactaggatatttgatttctgatggaaaagatatgtctagaactgatgttgtattggtaggaatttttgttattggatttttaggtatactttcagattatctattttcaaagataataacaaaatttagcaaagggaagcaggttgatttaaatggttagaagtggatttttgctagagaatatatataagaaatatttagttgataataaagagcatttagttcttgataatatatctttaaatatatctagtgaagagataactgttatattaggtgaaagtggatgtgggaaaacaacgctacttagaattttagcagggcttgaaaatgctactagtggaaacatatatttttttaataatgataaaaagtgtactccaaaagtaggaatggtatttcaagaaagtagacttatgccatggctgaatgtaagtgaaaatatacttttacatactgaaaaagataatagaaataaagttgatttagacaagtatttaaaaatgatgaagcttgaaaagtttaaaaactcatatccaaatgaattatcaggaggaatggctcacagagtaagtatagcaagagcactttccttcaatcccgatattttgctgatggacgaaccatttgcagcgctagattacttcacaagaagaaaaatgcaaaaagaagttgtaaatatccataaaaatactaaaaaaggtgtagtatttgtaactcacaatattgaagaagctatggaaatagcaaagaaaataattgtttttagtaaaaataaaaggattaaacaatttagtgtcgaagatgaatataatagagatttaactaaaaactattatataaacttgaaaaaagaaatattaagggaattgggggagttttaattgattaaaagaaacaaaaagattttagcagtaatgacatctttaataatggtgttggttgggactgtaggatgttcaacaacaaatgataagaaagatgaacctgcaaaaaaagaggctagtttacctaaggaaataaatttaacttatgtaaaatcaccacttaatgttcctagtatattagaaaaaaaggatgatttatttggaaaggaatttaaaaaggacaatataaaagtcaacttccatgaattgacaacaggaccagagcaaactcaagcattagcagcaggtgagctagactttttacatgcattaggaggaacgtctgcaataatagctgcatcaaatggtgttggtcttaaaattacgaatatttatagccgttcaccaaaaggatatatgcttataactaataatgataatattaaatctataaaagacttaaaaggtaaaaaaattgtaggtccaaaagggactatacttcatcaactgttgattgctgcacttgctaaagaaggctatactatagatgatgttgaatatgtaaatatggatattcctagtgctgcttctgcattagaaagtaaaagtgctgatgtagcaatgcttgcaggtccagtggcattgaaaacgataaattcaggtgccaaaatgattgtaaatggagaaggattagtaagtggaataatagttactgctgtaagtgatgactttgctgaaaaatatcctgaattagtaaaaagatttatgaaggttcatgaagaaactttaaaatatatgaatgaaaacaaggatgaagtgatggatgttgtatctaaagaagttggtttatctttagatgaaacaaaagaaatgtattcttggtatgactttagttctaaaataacggacaaggatataaaagaattagaagatacacaggaatttttgatgtctaatggaatgcaacaaaagaaaataaatattaaagatatgttgtacaatcaaaattagaatactttaaaatattaaagtggaaaatacacccttatttattatggaaactgtatggtaaaagagggtgtatttttattattatacaaaaatacaattaaaaacaacttactattttatctacacttatgtagtctagtaattttctcattttcttacggtgaagtaaaaactttgaatatgtgtcctcggattgttttgtgtcaccataaactttccaatatttaatcatagaaacttcataattactatatcccataaatccaatcacatctttaagaggatatcctaaaaaaatacctatttcatcaggaaaaacatcactcttaagtttatttactaaatgctctaaataagcattaacattcgtattttgtttgtatcctaaaaactttaaaaagtttactgtttttttacattttaatttttctgataatgcttttttatttacaaataagatttttaatccctttttttctttatcaataactataaaatctattttcttacatttatatagatatttataaatatcattaattttttcctctctatttacatcagtaaacgaaatatttattatttcagcaggtttagagcctaaaaagactggacctaaaacctctaaaagccattttatatatgatgattcaattttatttttacaacaaaattgtgaattacaacaagacataaaagataacctccttcaaatgaaaattaatatcaagtaattagattatactatgaatgataatcaatatcaataataaaattataatttttttatttaattatttattcattatgatttccaaaaaaataaattataacttgtttaattttagtaaataaaaaataaaaatatagaaatactaaattaagaaagaaaattattaaaattttttgtagtacaaaacatctaggagggtaataaaaatgaaattaaaaagaactttatttgtaggattagcattagtattagctataggaataactgcatgtgctagggataatgaaaaaccaaatgaaaatgcaggaaaaaatcctaatgaatctgtaaataataatgaaggatatatgaattattattcaacaagttataatgattatatagcaggtctaaatagatattctatttatgatactccagaaagtataaacaatcagtttaaagataaagaatatccaggaaatgaaaaatatctaagtgatgtaaaggctgcatataaagatagtagagataaaatacaatcatttgtaacatctcttaaaaaagacggtaaaacagaagatacagagttaaagagaatgaatgatgacctaatagctgaaggggaaagattagtaaaagatatagatgagagaatagaaaaattagataaggtatctgatgaagatatgaaaaaaggtcaaaatgattttatgaaactagttcatggaactgaagatgttggaaacgatattggtagtggttttagaaaaatgataaaagatatgaatgatagattgggaataacaggaaataataaaaaataatagagtaaatagttttaaagttagaaataaatatttgaaatatagcgaagccttgtaattaatatattttttggcttcgcttttttgtatgttatcaagatactaatttttatcttgtaacctcatattttcattatagtttatttagaggttatttttttatgtttttacttgttttttctctttttaaatttttgttttgcaaaattgtaagattcttctattaaagttttaaagttctcaaatgtcttttcagtagggcttaggacgcatatccatcccatccatgagtagataggatgtggcatgattgtgtccaattttgtaaaatcaaaatccatatcaactatttgccctacacctggacgctttggaatatatccaaacatttcaataaaagtttctttttttaatcctatattcacacggtatacatttggacgactaaccaacgaacctttatcatgattactgtctttttctttaatggtaagaacatatacccctcgctttaaaacaccattaggattgtagtaaattgctcgttccccccaactatccattagtacaacatcatctaagtttgatagacaataattgagaatatcatcagccttaatagtatcattttccataaaatatcaatcccttctttctttaatattattattgctttagatgcaagaatatcttatcatataatggtgacaattattgtcactatatttaaattaggagtatgaatatgtcaagagctgagcgtttaattgaactgatgataacaataaatgcaaaaagaagttttacagcgggagagctagcagaagaattttctgtatcaaaacgtactatactaagagatttacaggtattggaaagtgttggatttccactatattcaaaagttggagcggctggaggatatcatgtacttaaagaacgtatacttccaccaattacattttcagagagtgaggtaaaatctatattctttgcatatcagtcactagagtattataatgatttaccatttgagcaagaaactatttctgttttaaagaaatttttaaattgtataccaaatgatattcaatataatattgagaatatgagacgtaaacttgttttttggacaccagataggcattgctcaacaccattattgaaggaattgtttaatatagtaatgaatgaatttacaattaaaattgaatattcatcaaagcaaaaaaatagtatacgtaccattgttcctattggtttgtatgctatgaatggactttggtattgtccagcttactgtataaaatcagaatctgttaaggaatttcgtgcagacagaattgtgaagattttgagtatagaaaacttatcaaataagaaatataaggttttatcttctatacatgattatcttaagaatatggaagtaggtacagattatcatattaaaattaatctgacagatgagggagtaaaacgttgtgaaacagaatttttgttggcaagaggattgaaaattttgtctaagggtggatacatagatatgtatataccaaaatctacacttaattgggtggctgaatattttttaacttttggaaaaaatgctacaataatagaacctatagaacttaaacatttgattaaaaaatagctacgcacacttgtgactttagtcatgagttagtagctaaattagtcagcatatagggaaacttatatgtagagataggataacacctatccaatactacttgaattgctaaaaacccctaaagctaaccaaactaaaacataaggatgaaataaacctaagtgtgaaagttacgaaagtagaaaaaattggttagatggtataaggttaaatcctaagtactttaaaatgggcaatcagcaggtaagctccgaataggagaaacttcaacgactattcctcttgagggaagtacactacaagttatcggtagtggaagtgggtagaccttagcggataatgccgaaggataagatatagtctgtgcttgcatgaaagtgtaagaagttcataagagaactgcataggtactagcgaacttatgtgaacgacaacctcaaaaatgataaaagttaagacttacggttcttatatatgttatttaaaaataaatataaaaaaccttcaaaatacttgttttaagtaattgaatattttaatattatgataggtgatgaaaaatggaagttactcatggtagaggatatgcatatagtatgtcaaatatagaaataatcagaaaaaacaagtaaagtgaggtgatagtagtggaaaaagcttataagtttagaatgtatccaaataaaaaacagcaagagttaattaacaaaacttttggatgttgtagatttgtatataataagtatcttgctaaaagaatagaagtttataaaaacaataaagaaacttttacttataaacagtgtagttctgatttgaccaacttaaaaaaagaattaaagtggcttaaagaacctgacaaattttcactacaaaacgccttaagagatttagataatgcatataaaaaattctttaaagaaaaagtaggatttcctaaatttaaatcaaagaaaattaatagattttcatataaaactaactttacaaatggaaacattatgtattgtggtcaacatataaaactacctaaacttggtatggttaagataagggataaacaagtacctaaagggagaatacttaatgctactatatctaaagaaccaagtggtagatattatgtatcattatgctgtactgatgtagatattgaagtatttgaaaatactaataatcagataggtttagatttaggaattaaagaattttgtatctcaagttgtggagaatttatagaaaatcctaagtatattaagaagtcattaaacaaacttgctaaattacaaagagaattatcgagaaagacaatcggtagtttaaatagaaataaagcaagattaaaagttgcaagacttcaagaacatatagctaatcaaagaaatgattttctacaaaaactatctactaaattaataaaagagaacgatattatttgcatagaagatttacaagtaaagaatatgattaaaaatcgtagactatctcgcttaatttctgatgtatcatggtcagaatttgttcgtcaattagaatacaaggctaattggtatggtagaaaaattgtaaaggtaggtaaattctttgcaagttcacaaatatgcaataaatgtgggtataaaaacgaggaagtgaaggacttaaatataagagaatggatttgtcctagttgtaatgaaactcacaatagagatataaatgcaagtataaatatattaaaagaaggattaagactaataacaattcaaaataaataacttatgtaagaaccgtaggaactacggggatagcctgtggagaattagtaagacatattttagtatgcaaaattctatgaagcaggaaccctgtgactttagtcatgggaggttcagaaagtctaaagtattagagctatataatcatcattgtatttaaattattttatttaatagtaggatagagtttggataaaatgttaattttcttaatttactttacagatgatttagatagattgatgttatttaatttatttcttataatgatgttctatagttatatagacattaaaatataaagtgttaggagctagaaaactaattaaaaatagttaattaacgataataaaaaataaaaaatttaaataaatttattgacaaatactattaatgaatatatcatatataacatagcaacaaatgataatagaattgaattaaataacgtcttatcaagagtggtggagggactggccctttgaaacccggcaaccagtatattttatatacattggtgctaaatcctgcaactaatatagttgatagatgagtataaatagctttctaagcctgagtttatactcgggcttttattttgttgtaatacataagagaggataaacataaaaactgagcagaatatatgggaggaaattttatgattagcataaaaaatgttaataagtattatggaaagattcaagtgcttaaagatgtaagtattgaaatagaatctggagaaatttttggaataataggtcatagtggtgcagggaaatcaacactactgagatgtataaacggattagaagaataccaagaaggcagtgtacttgtttctgataaagaagtaaagtcattgaatgaaaagcaaatgagagatttaagaaaagagttaggaatgatttttcaacacttttcattgcttgaaagaaaaactgtatttgataatgtagcattgccattagaatgttttggatactcaaaggcagaaattaaaaaaagagttttagagttattagaagtagttggaatatctgaaaagaaaaatgataaacccagaaatctaagtggcggacaaaaacaaagggttgcaattgctagagctttagcactaaacccacaagtacttctttgtgatgaagcaacttcagcattagacccaaatactacaaagtcaattctttcattgcttgaagatataaataaaaaattgggaataacaataatagttgtaactcatcaaatggaagttataaagcagatttgtggaagagtagcaataatggaaaatggagaagtattagaggtaggagatacagaagaaatattcttaagaaatactaaaggacttagaaaattaataggtgaagaaagtataatattgccaaaaggaacaaatataaagatactattccctaaagatatttctaatgaagctattattacgactatggcaagagaactaaatatagatgtgtctataatatttgggaaattagaacaatttaaagatgatattttaggttcacttattataaacatttcagataaaagtggagagcacgtaaaacaatatctaactagtaagggcataagatgggaggaaatgataaatgaatagtttaattgactttttaacaacactatttccaaatgcattgttacaaactttgtatatggttatagtaccaactatagtggcaacaatattaggatttatattagcaatcatattagtagttacaaaaccagatggattaaaaccaaatagcacaataaatagtgcattaggatttatagtaaatatatttagaagtttcccatttatgatacttatagttgcaatgattccaataactagattaatcgttggaacaagtataggggaaactgctgcaatagtgccaataactattggggcagcaccgtttatcgctagaattatagaaagctcattaaatgaagttgataaaggattgatagaagcagcaaaatcttttggagctacaaaaagacaaatagtatttaaagttatgataaaggaagctatgccttcaatagtatctggaattacattatcaataatatctatacttggttatacagctatggcaggtgcagtaggagctggaggattaggtaatatagcacttatttatggatatcaaagatttgatacagcagtaatggtatatactgtaatagcacttataatattagttcagataatccagggagtaggaaatctggcttataagaaactaaaataaattaattataaacattttaaagagggggagtaaaaatgaaattaaagaaattattatcagtagcattggtgtcagcaatagcaatatcagcagtaggttgttcaaacaaagaggataaaaaaatactagtaggagcttcatcaaatccacatgcaaagatattggaagttgcaaaacctttgttaaaagaaaaaggatatgatttagaagtaaaaatatttgatgattatgtacttccaaatacagctttagatgaagggtctttggatgctaacttctttcaacatattccatttttagaggaaactgtgaaggagaaaggatataaacttacttatacatctaaagttcatatagagccaatgggattctattcagaaaaagttaagtcattagatgaattaaaagatggagctgttatagctgtgccaaatgatgcaactaatggagctagagcacttaaattattagcaaaaaataaattgatagaagtaaaagatggagagcttataactaaaaaagatataactaaaaatcctaaaaatatagtaataaaagaaatgaatgcagagcaattaccaacagtattaaaagatgttgacggagcagtaataaattctaattatgctttaacagctaacttaaatcctactaaggatgcaatagtaatagaatcaagtgattctccatatgtaaatataatagcttgtagagaaaataataaagatagtgataagattaaggctttatcagaggctatgaatagtaaagaagttaaaaaatttatacaagatgaatataaaggaagtatagttccagctttttaaactgaatatacaaaatctacaaaatgagtaaaattaaaaatatttactcatttttttttataactagaaagtgacaaattttttggaagaattgtggtaacatatttataggtaaaactatataaaaatgaagaagtggtggggaatatggaatctaaaggaactttaagtaagaataaggtctatatactagctaatgggttatttttggttattgcacttttaaatataaatttgtatacagtttctataaatatgtatagaataattttactttggatatttggatattctatagtttatataagtagctttaaaacagatgaatttataaatatattgaaagtagggtgtcttgtattagtttttgtaagtattttaggagtagtaaatttaaaaattcaaaaattccaaattgtattgcttaacttaagcataattaatatgtctacttttatatacttaaccatttctaaagtaaaaaaactaagaataagcccaatactaattttttatagtgcttttgtgatattagattactttataagaaatatttttagtgatattaactggaatatgattattatattaattaatatttgtatatctatgtttaatttactatatttgttgaataaacttgatagtaacattgagcactataagttaataaaagatttaacatattttgttttttttacaactattatatgttttgtagcaatttctaagattaatatagtagattcagatagattaataggagtaatatatttactattatgtaaccatacttattatgtatatgtatacagtcttaataatagagtagtgtatccatattatgaacttgattcaatcaataaaaaattaagtaaaaagtcagagcaattaggaaagataaatttagcaatagaaaaggatatgattatacaaagaacattaaaaaactacatagaccagagaaaagaattacttagacaagctctggatacaataccaaatgtatggatagtaacagactatgattttaatataagttacacaaataataaatttaaagatgaattttcaaaggatatgaataattattataaaatattaacttttataaaggaagatgaaaaagttgctgaaaaattgaagaaatttgataacgatataagtataattgataaactggtagagttaaatgataaaatttatttgttaagtttaagtaataataaagatgaaagcaattacttaataagtttaaatgatattacaaatgaaatcaaaatagatgaagaaataagaaatataaataaagactatgaaaacattatactaaatattccatctcctatacttgtaagaagtgctgaaggtggcataaagaagaataaggtaataagtataaataaaaaatatgaaaagagttttaaatgtgtttcaagtgatttagtcgatatgacattagaacaatattttgaaacttttaacatagatttctttgacaataggaaatttaaaagattaaatctaacacaagaaaagaaagctgaaatagtaagttacaatgacacagcaaactgtatagttaattttgtgatgtctgactcagaaggtgaagaacatgttgaagaagttagagttggagactattggtcagataataaactctttaaattgcttacatttagagatataactaaagagataaatattcttagaacagtaaatgaacaaaaaataatatatgaaaaattacttgatgttataccagaggctatttttcttgaggatttaagtacatcaagagtactatatacaaatagagcctttagagagttgttcggaatttctagtgatgtattaggagttacaacacaaaaatatagaaatatattagtaaaaaaatacataaacaatttaaatataggagaaagagagaagagtatccatatagtaaatgaaaataatcacattaaagaagtaaaaatgatatcaagaacattatactttggacagaaaagaagtagagtgagaattattaaagatttaagtgtgcaaagagagtctgaaagacttaaaaaagcattaataaaacaaagacagtatgaccaaatgaagatggagttttatgctaatatatctcatgaacttaagacacctttaaataatatatatagttcagttcaacttattgaaaacctttataaaaaaggaaaaataattgattttcaggatatactaaaagaacatataaaaataactaaacaaaatatgtttagattattgagattaatagataatataataaatatttctcaagttaagtcagacatatataagattaaagcagttaattttgatattattgacataacagaaagaatagttacatctattagtagttatgctaagtctaaaggaatagatttaatttttgatacggatgaagaaactgttatggtagggcttgacccagaatctatagaaagaataatactaaatatattatcaaatgctataaaatttactttagaaggaggagaaatccttgtaggtatatataaaaaagacgaaacagtagagataattataaaagatactggagtgggcatagacaaagaaaaattaaatgatatatttaatcgatttaaacaaattgaaaacagtggtatatcaaatgaatttggaagtggtataggtttatgccttacaaaatcattgattgaaattcaaaatgggaagatttacatagatagtaaggtaggagaaggaactaatgtaaaagttatattcccaattaaagaggttgttgaagaagtatatgataattcaaattacaatgataatattgaaaagtttgagatagaattttttgatatatataaataataaatggctaaatttattgtttatatatatcacattaataagagttaattttatttattactttagttgtatttgatgcgttttaaataaattttatgaggtgaaattttggaaaaggatttttttagaaaaaatggaattgatttagccaaatcaatattaggtaaatatctaataaggaaatatgaaaataaagtaattgttaccaaaatcatagagacagaagcatacatgggtgtaaatgataaaggagcacatgtatatggcaataaaaagacagatagaactaagccattatatttagatggtggacatatatatgtttatttaatttatggtatgtataattgcttaaatttatctgcaaatatagaaaatgtgccagagtgtgtattaataagaggggtagagcctataacttctttagatgagatatctatgaatagatacaacaaagcttacactgagttgagtaaatatcaagtaaaaaatattactaacggaccaggaaaactttgcaaagctttaaaaatagatagaagtctaaatagtaagagtataatgggtgaagaattatatataagtgatttttattatgatgataaaggaaaaaaagtatttagtaaagatgagttagatataaaaactagtaaacgtataaatatagattatgcagaagaagcaaaagattttttatggcgtttttatatagaataagtttttatataggtaagatatgtatctataggaaggtattttataggtatgtatcttatttttttatagaatttttagtttgataaaaataactttatagaattacaaacatatttaataaatttataattattttaatgatataaagaaagatatattttggcgaaatgagctataaaaattaatttttttgtgtattttattaaaaattataaaatttgtatagataattagtttattttataagtaataaattaattattaaagaatgaagaaattttgacaaaaaaagaaattatatttagaatatagatatatttacaagaatcttattgagatgatattattttttatcataagcaattcttgttaaatgagaaattagaaaataaaatataaatctacataaaatacttcaataactcttgacaatctaaaaaatgacaaggctgtatataaaaaatatatatagtattaaactctaaaataaaatatgttgtagagtaaaaaaagacattgaatagatatcattaaattgtaaaattatgttataattgtactaaaggatgtaataatgtgtagaaataataatataatttgaaattttaataattaaaccagaagaagactacatgaacaacttaagttttattatataaagagtaaatgcttataaaaaatgtatctttagttggcaagattaaatatacatatgtgaaaaataaatcgtaaataatcgtaaaaatgtagacaaaaaaagattgataaattatagtaatacttataaaaattttttttaaatgaaataaagataggttcagtacctatatttatatttttgtatttatattatgaaaaaattaaaattatttaggggtgatggttttgaataaggacataggagcaaaaataaagcaactcagaactcaaaagcaaatgacgctgaaggatatgagtgaaaaaacaaacttgtcaattggttttttatcacaacttgaaagaggattaacaagtgtggcaacagattccttaggaaaaatagcaagtgtactagatgtagaattaacttacttttttatgaagccaaaagagcataaaagagctgtattaagaagttatgaaaaagaagtatttgatgtagaaaactcaacatttatacattatcatttatcatctagtttaaaggaaaaaacaatgctaccaagattaattgaaattcttccaagtaagagtagtgaggaaatttgttgttacgtacatgaaggtgaggaatttgtgtatgtattagagggtactcttacagtgtttttgggagatgaacaaatagaaatgtatccaggagacacaatacactataatagtgaaaagaacaatcataattgggtcaactatactaataaggtagtgaaaattttggtagtaagtataccaaatccatttgaaaagtctgatgcagttaaagaagcttaaattttaacgattactattagtcaataaggaggtactaaagtgaaaaaaattggattcataggtgcaggaaatatggcaagcgctatgatagggggaatagtaaattcaaaattagttgaacctaatatggttatagcatcagcatatagtcaaggaactctcgatagaatagatgcaaattttggaataaatactacaaaagactcgaaggaagtaactagaacctctgatatagtaattgtagctgttaaaccagatatatatgatgatattttggaagagataaaagactttatagatgacaataaaattatagttacaatagcagcaggaaaatctataaaggatatagagtcaattataggagaagataaaaaaatagttagaactatgccaaatactccagctcttgtaaatgaagccatgtcttctctttctataaataaaaatataaacaatgaagacttagaagcagttacagaagtatttaattcttttggaaatactgaggtagtaccagagtatcttatagaagctgtaattggtgcaagtggttctgcaccagcatatgtatttttatttatagaagctatagcagatgcagcagtaattgcaggaatgccaagaccacaagcatataagtttgcatcacaggctgttatgggttctgcaaaaatggtacttgagacaggaaaacatcctggtgaattaaaagatatggtatgttcacctggtggaactactatagaagcagttaaagtacttgaagaagaaggttttagagcttctgtgataaaagcaatatgtgcatgtatagaaaaatctaaaaaaatgagtgagtaataaaaatttattgtaaataaagagaattgccttttatagaaaatttccattttaggcaattctttttatttgtttaatttctaaaataagcctgaaagccaattttttattttttcaaagaaaccaactgagtcattattatttgattgattttctgaattatttgttgtgttgttttcatttgtttgagaactatcgttattttcattattacttgaagtatcattttttgagctatttgtatcactatcattgttagaattagtattattttgtggatttatttgaacaccttctgtagaatttattacagcatcagagccaagagactcatcattagtgttatttaagattcccaaatcttttttatctccgcctgagaataaaccagagaaccagtctcctattccactaaaccatccaccaatagtatctagtataccagaacccttaacactttcacctaatttctttaattgttcatttacattatctgatacattatctagtgtatttttcatgctattgtaatcataattttggtcagctatttttttcattacacctttaatttgttctttttgttctggtgtaatagtaatattgtaattatttacaacattatttattgtatttgctatttgattggtatcttttgtaccattctttacaatttctgtttttatatcattcattacacctgttgctttttcttgccctatatcatctcctaagtcacctgtaactaccaattcttcagaagcaatttctttcttagtttcatcaagtttctttcctgaagcatcctcaaatgctttcatgattcctgtcaatgctccagtaccacttacaggatatggagcagcagcaataacatttgcatcttcaagaccagctgttgtaagggttgaagcaatcattgaactagttacccaagttaagtttgctgttttaacattaattccatttccttttttagtaggttcaacgtatgagcaagagatagtaacttttccaagttgaccctctgttgcaacaccttgtaaatactgtctttcttctgcatttgttacatctaaaactaagacttggtctttttttactccaaagtaattaagcatttgctgcttttgagactctgataagttagctccaagtgtaactacatttgtaccatctgcataagaaaggttcatactcccaagtacaagcatagtagacacaacaatagaactaatttgttttttaaacttcataatattcctcctagatttaacatacattacattttcaatctatttttttattaatatattgaataaaaatatgtgctacatttctattatactaaatataaactattttttaaatcaatgcgattacaactttgtaataaaaaagggaatataaggaagataataaaaaaataatttttgtaagagattgaaaaaacaattaatgtagtatactataatatagaaatgattatgataatgttatagaatcggaaggagaaaaataaatgtcaaaagaattagtaaaagatagagtaataaaatatttaatagaagatttattagtccctcaagatatgattgatacaaatgttgagttggcagaatttgaagaaggtgcagaaggagttttagatattgttgtaaatgttaaagatgaagaagattattatgcacctgtaatgatagtgcaatgtttagatgaagatgtagagttagaaggagaagttttacaaaaacaaatagaatttttagaagaagtggataatataactatgtcaggtagattggttttaactaatggggatgctatgatgtacgctgattggagaggggaagaatacgatactgaggcagctcttccaacttatgatataatggtaaaagagtttcatgaaatggaacaacaggcaaaagatttagaagaacatcatcaccatgataaaaattgtggatgtggatgtaatcatcatcatgaaaattaaatattgagcatatatataaaaaaagactgtttagtaaacagtctttttttagacatatatcattcaaaaaactaagaatataacaacatataataaaataaattatatatataaggaggatattgcggttagaagtagaataatattataggtatagtttttataaatttgtatacataatatacaaaacaattcatttaaagaatgggatattatgtaattgtagattatgtaggtttaaattatttatttttgttttagcaaattctatgaatagaaggggtttgattatggatactaaaaaagaaaataattatgaaaattatatttgtgtgggttcatcaaatgtatcaaatgcgatgaaaatgtatttaaaggaaatagaggaatacaaaatgttgtcagcaggagaagaggtagagctggctaaggaaataatcaactcatcttcagtagcaaaagaaaaatttataaattcaaattataggttggtagtgagcatagcaaagagatataaaagagatagtattgatatgttggatttaattcaagcaggaaatataggacttataaaagctgtagaaaagtacgattataaaaaaggatacaaatttagcacttatgcaacttggtggataaaacaaagtataacaagatatatcgacgattgcgaaaatactattaggatacctatacatcttcatcagagaataaattttgtaaagaaaaagaaacaagaacttttaaatgtattattaagagagccaactatagatgagattgcagatgcatgtggcttagaagttgacaaagtgttggaattattaagaagagataaaaatgttgtatctttggatactccattaaaagaagatgaggatagtagtttagttgaatttataccatcagatgctgattttaaagatgttgtaatacacgaagttgaacagcataatttaaaagaaaagatagaagaactacttacaggtcttggtgagcaagaacagcaagttttaagaatgagatttggaattgatgatgatgaccctaaaacactagaacagattggaaaggtatttggagttaccagagaacgaataagacagatagaagctaaagcaataagaaaattaagacatccaagtaagttaaaacaattaaagcatttttattaatatttttagacacattatatatgagagtatgagaaagcatgttaatctctacttaggaattatttttttataaaatctgtttatgaacagcacacttgtattttataggtgtgctgttattttatttatttaataaagtacataatagtttagtaaaatttctcaatatggacaaaatatgttagaatatagtttaaaaagataataaaatctgttttttacttttaaagttatcgggtagcaactccatttctttgaatataattgaagctatacaatttatataggaaagatgtaaaacttattggagaaataaaaaaatatgaagaataatgtagtttgtgatatattaagaaataggtgttaattatattttgatagggctaagcaaggcaaattagttgatagaattatatctaatgagccaaattttacttgattaaaaagaggtatgttagaagtggagtgataaaatgagcaaggtagctaaagcaactttttatttgatgatagttactataatctctaagattcttggaatgggtagagaattagtattatcatcaatttatggtacaggcttatatacagagagttatttaacagctatgaatataccaaatattatatttgcagcaataggtactgctatagttactacttttattccaatgtatcaagatataagtagtaaacaaggtgaaaagcaagcactaaagtttttaaacaatgttttaaatataatagttggtatatgcatagttgtagctatattaggagttattttctcaaagcaacttgtaagtatatttgctataggatttgaaggagagaggtttttacttaccgtaaaatttactaaaatattgataacaggaataatattcataggtattacgagtgttatgtcagcatttctgcaaattaaagagaactttattgtagttggatttgggagtataccctataatatagtaataattatttcaataatgttaagtaccgtatttggaccatacatacttccaattggtgctgtggttgctatggtagttcaactgctcttttacatgttttttgttaaaaaaacgaactacaaatacttatactacttaaactttaaagatgatagccttattaaattactagcattactttcaccagtatttataggtgttgctgttaatcaagtgaactcattggtagatacaactttagcctcaacattagttaaaggaagcattccagcacttacttattcagatagattaaatggttttgttacagggacatttacagcttcaatagtatctgttatgtatcctatgttatctaagttaagtgcagaaaataatcaaaagaagtttactagttcagttaaatctagtataaatatgataataatttctatgattcctatttcagttgcttctattttttttgcaactcctgttgttagaatcatttttgaaagaggtgcttttgatgcgagggcaacccaaatgacagcaactgccttaattttttatgcagttggtatgactgcatttggattaagagatattttgggaaaggttttttattcattacaagacacaaaaacacctatggtaaatgggattatatctgtaggggtaaatatagtattggacttagttttaataaaaccaatggctcatggtggtcttgctcttgcaactagttcatcatcaattgcatgtatattgttactcttcttgaacctaaagagaaaagttggatattttggacaagataaaataataaaagcaactttgaaatcggtagttgcatctttaattatgggtgttttatcatactttacgtataaatttatatttggaattttgggagtaggaacatttaatgagtttgtatcactagctatttcagttatagttggaggtggaatttatacactactaatgactatttttaaagttgaagaggttgatatgatactgaatattgcaaagagaaaattgcatttaaaaaagtaatctaattatattaattataaatttaggaggattttatgaaacatatattaaaaacagtagaccatactattttaaaagctacaactacatgggaagatattaaaattttatgtgatgaagctgtagatatgagtgtagcatcagtttgcataccaccatcatatgtgaaaagagcatcagaatatctaaaaggtaaaataaagatatgtacagtgatagggttccctttgggatatcaaactactgctacaaaagtatttgaagcaaaagatgctattgaaaatggagcagatgaagttgatatggttgtaaacatttcagatataaaaaataaagattatgataatataggaaaagaaataaaagaaataaaaaaagctataggagataaagtattaaaagtcattatagagacatgttatttagatgaagatgaaaaaataaaaatgtgtgaaatagtaacaatgtcaggttcagattttataaaaacatctactggaatgggaacaggtggagctactttagaagacataaagcttatgaaagagcatgttggaaaaaatgtaaaaataaaagctgcagggggagttaaatcaatttctgatgcagaaaaatttatagaggcaggagcagaaaggttaggaactagctcaatatgtaaaatattaaaaaatgaagatacaacagattattaaagtttttaacttatgggataggattacaaaaatcaaaatttaattataaatataaagaacaaaaaacagagggaattttccctctgttttttatttagtattgacagaaaatatttttcaagatattataagttatatagttaattagttgagtaactaactaatggagaaaggaggaacctatgaaattagtattaaataatgaagaacctatatttattcagatagcacgagcaattgaagatgagatactatcaaatggaataaaagaagaagaacaggttccatcaacaacagagctttcaaagctttataaaattaatccagctacagtattaaaaggtataaatatattggttgataaaaatattttatataagaagagggggatagggatgtttgtatcagatggtgcaaaaactattataaaagaagctagaaaagaaaattttaaacataattttgtaaaaaacctacttcaagaagctaacaaattagaaataaatagagaagaattggttgatattataattaatttcaaggaggattaatatatgaggagttctattaagatagaaaatttatctcacagttttaagaagcaaaatatttttaataatatgtctctaaactttgaaaaaaataagatatatggtttattaggtaagaatggagctggaaaaacaacattattaaatataatggtaaatcagttaattcaaaatgaaggtgagatagaaatattaggaaagaacccaaaagaagatataaaagttttggaagaagtttgtatcgtcagggaaaaagaattttatagtccagattttaaagtaggtcagatatttgaattttcttctagtttttataaaagttatgataaaggcttagaagaagaattatgcaaatattttgatttaaatactaaaaaaaagtataaacaactgtcaagaggtatgaaaactatactttcaaatataataggtatttgttctaattcagctatcaccatatttgatgagccaacaattggtttggatgcagtaaatagacaagagttttataacataattttagatagttatataaaaaatccaaggacaataataatatcaactcatttgattgatgaaatagatgatttactggagcatgtaataatattaaatgagggaaaaattattatagatgaagaaattgatgtcataaaacaaaaagctcattatattactggaaataaagaagagttagaaaaattagaatgtataaaaaatataaaacctaaaaaggcatttggaaatgcagttgcttatttttactatggtgattttagtgaaaatgatgaaaaaatacttaaaaattcaaatattgatgtaggatacatagggctacaagatatgtttgttaacatgactaagaaggaggaattgtaattgaatgaattaaagccatatataaaattttttaataaaaatactaaattgtatataattatatttatgattgtgggaattgttatgaatattttgccagtgtttatcctcaagatttttggagaagcatctaaaactaatttatccacgattgtgaatcctattttaacatatataactatactgctatttgtgtatggagtaaatatagcaaataaagacttttcaggagctttaagtataagagcagatcgaaaaagttgtataaaagctattgtcatagatttaattattttaagctttgtgatttctattttaggtatagttttgatttttttatcgaagttatttatagaaattataacaggttacagtatagaactatcagttttactaaagagagatatgatttggacatctatatcagcactgatagatccttcaacatcaagtatgccactaacttatttaaattattttgtacaaatatgtataaatgaaatatgtataggttttataggagtattacttggagcttttacatatagagttagaaaagttactagtattactatattgataggattaccgatattaatggtaatttatatagttaattttgcaactaaaaatatgcataaaatgctattgtatttagaaaaaattatttattcatttcagaatccttttattttatttggaacaaaggtaggaattatagttatttgcataatatttataattttattacttagaaaagcaccaattaaagagtatgcaaatgacttattataactaaaataaaacctgcttaaaaatcaaatttgtaaatttgtattttaaagcaggtttattagttttaataaatgttgattttaagcattaatttttaatacttatatctacctttatatttttttataaatagaatagatataaatatggttataacctcagcaaatggaactgtaagccataatccagtcatgtttaacataggaggaagaattatgattcctatgattataaaaacaaaggcacgactaaaagatataatagctgaaatttttccattgtgaaatgctgtaaaaaatcctgatgcaaatatatttataccaacaaacaaaaaagcaaatgcaaatatttttaatccttgtaaggctagtttaaatactgtgttatctggacttacaaaaaccctaacaataaatggtgcaaatactaaagcaataataaacactaaaagagaagaaacaaatataaattttagagaatgtttaaatgtttcttttaatttatcactgttttcagcaccaaaattatagcttattaatggagacactccagcagcgaatcctagatagactgatgtcattaaaaaatgagcatacaatactatagtaagagcagcaagtccattttctcctgctaattttaaagctactacattaaataagaatgttgtaattcctgtagataattctgtaaccatttcagaagaaccgtttatcatagtatctcttataagtctaaaatcggtttttggttttcttaatttgagtgtagatttattagataagaagtaaataatacctaaaacacaagttaaaataatacctatagcagttgcaactgcagctcctaaaagacccattccaaaatatttaataaatacataatccaatattatatttgttacaccaccaatgactgatagaaataaactaaatttagaatttccatcagttcttgcaaagtagttaaatataaattttaaaatataaaatggtgtacataaaatcataactttaccataagttatacaatatggtaataacttatctgttgcaccaagcaaaatagatatttctttgataaagaaatatgagattactgtgaatgaaatcccaacaatcaatgaaaacaaaactataaaagaaaatgtagagttggcttcatcctgtctattttcacccatacgtatagaaacgatagcacctccacccgttgccatcattattccaaatccacaaacaaggttaattataggtagtacaatatttatactagcaagagcatcggaaccaactaatgttgatacaaagatgccatctattattgtgtacaaagatataaatatcatggatataattgcaggagaaacaaattttagaaattcaaaagtagtgaattttcttgtaaataaattttccataaattttacctccttttattactctctatctataataagctatatagtaactatatgtcaagaaaaattttatttatacgataaacagcttaaaatcaacaaaaaatcatattaagataaattagtataatgctaattaataaacttatattagtaaaaataggtatattgcattagtaaggaataactgtttcttaagaaaatttttagaaatatatgtatataatcttaagctttataagttattatatatatataagattttgtctgaaaagaaatagattttaactatatatcttttatacaacttattttaaattagttcttatttattaaatataatgttttaatatagaagagaagttatttttatttcaagcagccattttatatactatataaattctaggagtgtgagatatgaaaaagttttttatggtagttttaggatgtatttttgttttaggtgtgatttctggatgtagcaaaaaagaatctaagccagtagaaaaaaacaagagtaatagtgaatggtttagtaatttagatacggaggatgttgatggaaataaggtaacaaaagagatattttcaaataaagaacttactcttattaatgtctggactacttggtgtggaccatgtgtgggtgaaatgccagagcttgaagcattatcaaaagaatatgagagtaataattccaatgtagctataaagggattagttgtagaagttgataaaactgatatgagaactggtctttcaaatgaagagaaaaatttagttaaaaacattatgaaaaagtcagatgcaacttaccaacaattgactgtatctgaagaacttaaaaaaactgattttaaaagagttatggagtttccaacaacttattttgtagacaagaaaggaaactttgtgggtgagaaggttgtaggtgcaaatagtaaggaagagtggaaaaaaattatagatgaaagactaaaaatggtaaaagccaatgagtaactttattaaagataataaaaaaggcatttctattattgcaattagtattatatttattgcattaggtacatatcgtggagaaacaaatacagtattaactaaagcaattatgatttgtcttgagtgtattggtattggttaggagaagaggaatgaagttattatctaaggtaaataataatataagacttattattcaagttgcatttacagcattaacaaatggatatgtaaatggatttttagaaggaactatatatggaggagaaagtaaaaaattatgtgtacctggattgaattgttattcatgtccaggtgcacttggagcatgtccaataggttcattacaagcagttttatcaagcagagagtataaattctcattttatgttgttggttttttaatggcatttggtgctttttttggcagatttgtttgtggttggctttgtccctttggacttgtacaagatttactacataaagtaccctttccagtaaagataaaaaaagtttatggtgataaatatctaaaatatctaaagtatatagtcttaataatgtttgtaattattttgccagttgctattgtaaatgtagcagggggtggaaatccttggttttgtaaatggatttgcccttcaggaacacttttgggaggaataccacttattttaggaaatgagaatttaagagaatcaataggatttttatttagctggaagttaagtattttgctattgatattattgatgtcaatcattacttataggccattttgcaagtatatatgccctttaggagcaatctatggtttttttaatcctatttcaatatatagatttaaaattgataaagataaatgtacaaattgtacagcatgtcaaacaaaatgtaagcttgatataccaatatataaagatgtaaatagtccagactgtattaggtgtggtgaatgtataaaagtttgtccacaaaatgcaattactacaactttttcaaaagataaaaaagagaataatatttgtgcaaaaaagtatagggggatataatttaatgaagaaatttattctatgtattataatgtttgcaatatcagtactggtgttagctggttgtactaatgataataagataaaaaatgaagtggatagtatgtttaattcaataaaaacacaagatgcagatactgttgataagtatttcccaaaatcagggttaggtaatcttatatacgaagataaagaaggatttaaaatgtattctaaaaatatgacttgggaaatttcagatataaagaataataaggataaagtgactgtagatttaaaaattaacaatactgatatggtttctattttaaaaaagaatcctcctaaactaggagaaatgatgccaaatccaactatgaaagatattgattctgcaaagaaaaaagaatttaatattacattagagcttgttaaatctggtgataattatgtttgtaaagttaatcaagaatctgcaatgaaattattaaatgtgattacaggaggtggtatagattatctagctgactataataaagattattataaacagcttgatgaagaacaaaaaaattatgaaaataaaaatagttagtaatatatatgaaaattggagcaattaataatatagaaacacaaattaaaagaatataaaagtggtagaatgaaagtcttgtagaagcttttattctaccacttttagaaataagttatttcatatgattttattatttatagagctatttacatgtatgtatattttatagaccaagattttctcctaccaatattacctttattttttttgctggacgactgattcttgtagtaaccatgtatgcacaaatgctttcaggacttgtgcaatctatacaacttccattaatatagcatggtgtattgacatcttgaaaacgctgaacaactgctggagatgcaattgttctagttctttgtattgcatcatcaatgttttttacaattttattcataccagctacaactataacattttttggaccaaatatcattgcagctacacgattgccatttccatcaatattaaagagttgtccatcttcactaattgcattgctactcatcaaaaaagtatcgcatagaagtgcttgacgcataatttcagttctttcttctggagtttttgctaaatctctatcaataactttaaatcctttctctctaacagcagtttgtacgcccatttctttaagtgtttcagatcctccccatgatactacatgattttgaggaattaaatctaaaatttgttgcaaagcttcatttctagttttacagtaataagcatcaaaataacgttttttgaatgctgttacaatatgaggacctagcttgtcatatcgtttctctaatggtgtttgtcttatcatactaaaatcactcccatatttaaattttaatattgtaactattatgctaattaagattatacgatatattattgtataaggttaattttataagtaatcttttcctaagattacgaaaatagttacaatatagttataacataaatatgcgattagtataagatttactattagtttttaacaaataactgaataaagaaatacttataaaacataatcactaatactttttatttaatataaaataaagttgtgggttatagatgatgattattttattttatgaataacttgtttaaattttataagtttataaaaaataaaggtacagttaactgtacctttattttatctaaatatgcaaagattattttaaaagtaatttttaattacatgtttttataactctccaatattctaatataatgatttgcctctcttaaaacatggtctgctaaaagtggtaatattatagattttatcttacactgttctattcctgatgctcctgcttctttaaaatctttaaactcaacagtttcatttagagtttcttctgtaatgttcttgatattagaatcagtcatttcgtttgttttttcaattaattcattaaattttatagcaaaatcatttgaagtatttattagttcaccttctgaggggtctagtaatcctctcataaacagagcatgttccatcataatatggtcccagaataattctatttctttagcgttttttgactcaatatctattttattttcaaggtcaactacataagaacgatataaatttgcttcatgtattatatgttcaagaagtagagggtagtttgatgtaaatatagtacatgatagtacaccatctaagactctttctttaaaattaataagcccatcaagtaatcttattgcatcagagttaagttgagctacatagttcactaagtcttgaccaacttgtgggtttacaccactttgtagatttaattctcttgtagtgatgtctttgtttatttctatccctgtaaactcttctgttttttgttctgcaactgatgtgagagtagttacaagctcttctgaatataatatatcaggtctaattataccattactagcactaacagtgtatgataataaatcttcaaattgctttttatagtggtcagcttccatagcaagattataatttttatttgtgaatcctgcttctaaaaaaagagcatgctctttcataattcttgaaaaaaataaatgtaattctagtgataaaataacatatttttgattatctatcataatttcctccctttagaaagtatcctatttataatactttattcgtaatatttaaatttatgtatattataaataaattaactaaattcaattgctactaatatcaacagtttttattaagttatgggcgaaaaaattatcttactgtgtttcttattagatatagatataatgatttaaggtacttgttggctattatttattaagagcacaagtaatactagaaatttttatgagaattatgtaatttataagtattattttgatacaaaacaaatattttttgtgaaacaagaacttttatagcaaaaaatgaataaatatgaagcaatcataattttataccacaacaattattaattctaatagctgcacttaatgttttaggtatgggatttaaaaagtataaaaaattaagtgataaatatattccattatattgcttgtgcttggagtagtattttctgtatggatgttaggatttaatccaacttctattttacaggggattctatgctggggtgtttcaattggattaaattaagtatgcaaacaatttcaagacaatgataaataattggatgtgtgataggaatatcaacaaaaaacattattaaaaagaattattttatttataaaataaaacaagtaataagaataaataaggagcaactaaaatgatttaaatatactagaattaaaaagagaatgtaaagttgtctagtaatggaggtaaaatattttaaacgataagctatgaaattgatatattaaaatgggtaagaagaatattatataggattcttcttacccattttaataaatttaattttatgccaaaccacattcgcatagtagaatcatcactctatggagacataactctacaacatcttctccatattttttaataaaatcaccaatttgagtttctatgaatgaatagtattcttttaaactagcaatatatgcagtcattatatgaacacattcatcaatcttatctttaaacacaactaatccccctaaaaaacgaaaaataaaaatattcagtaaatagcagatattatttcactcataaatctatatagtatgatatattgcttagatatattttacaagtggatatgtaaaactggttattataatcgcaaaactggataaactttcattcttaaaagaaaatttatccagtttaaagtttaattatgaatatttgagttagtagatatttaatataaattaatataagtgtaataagaatatacttatataattataattaatcatacttttaaggaatttaattttaaaattttagttattgtaatctattattttctaagcaatttattattttttaggtaatttattactttttaggtattctattattttttagatatattatataaaattatatactatatatttaactcaaatgtaaaattatcaattagtctggtttttcctataaacacagcaattgccacaaggatagaatgttctatttgcttaacaggttgtaatgtctcactatctacaatttcaacatagtctatttttgctaagtgttcagaatttattttagctgttattaattcttttatattctttggatttagattgccttttactaattcttcttttgctaaacttaagctcttatttaatattagagcagattttcgttcttcctcagagagatatgtatttctcgaactttttgctaatccatcattttcacgaattataggacagcctattatttctgtatttatgtttaaatccttgaccattcttttaattacagccaattgttgggcatccttctctccaaaataagctttatcaggtgttactatatttagaaactttgaaacaactaggcagacacctccaaaatgaacaggtcttttagctccacaaagaaaatctgtaagtccagaaacattaatggtagtacaattaccttttaaatacatttcttctggtgatgggttaaagactactgttgctccactatccatacaatatttaaaatctttatctatatctcttggatagctattaaaatcttcatttggtccaaattgagttggatttacaaatacactcactactactttatcattttcttttacagctttttttataagactttggtgtccttcatgtaaaaatcccattgttgtaacaagccctatagaatagccatgttttctccaatctttgattatatttcttagtaatttaatttcttttacaagcattttgtaccatccttaatattagtataatttttctaactcagattcatttattgaaaagctgtgtttttcttgtggaaatgcacctgtattaacttctaggatgtaatttttaattgaatctttcattatatctcctatatttgcatactgctttacaaacttaggaacaaaatctccaaacactcccaacatatcttgataaactaaaatttgtccatcgcagttaattcctgcccctatacctattgtaggaattgaaatagaattagttaccatatcagctattttcgtaggaactccttcaaggacaatagagaatgcacctgctttttctattaatttagcatcttcaataagttgtcttgctgtttcactggtatttccttgaaccttaaacccaccaaatgaatttactgattgaggagttaatcctaaatgccccattacaggtatctgagcatttacaatgctttctatttgctttataacgtttgagccaccttctaactttacagcatgagctcctccttcttttataagtctaccagcgtttttaactgcatcttctatagaaacatggtaagatagaaaaggcatatcacttacgattaaggcattttttgcaccattttttacagcttttgtatgatatataatttcgtctatagtaacagatagagtgttttcttcaccttttatgaccattcctaatgaatcgcctattaaaataccatttatatcacattcatccattatttttgcaattgagtagtcataagcagtaagcatagatagtttttttccttcatatttagcgttcttaaaagtctgtatggtatttttcatcgttttttcctcctaaaagtttgtaaatttctttgtatttttcagatttacttattaaattttcgattgcattttctatagtaatattttttgtaccttttaatgaattgtcatttcctaaggcaattatttttagtaggtttaaggatagtattttgtagatatcctcatcttttttattcaatacagatagatgtttccttattggtgttatatctccacgagaaacaggaccagtaagagctttagtaaagccattatcaagtatattttctatatttttttttactaaaggactgatagcttttaaagattcctcttcagataaacctaatttaataaagtaacttactcctatatctagtaaagataatactaaatttgaaactaaaacattagctagatgataagtggatgaagtatccttatctcttataaaaaattggtttcccaaaccatctatgaaattttgaataactaaatcatcttgttcattatcaccttctatggaaaaacaaatgtctttcattttttttatgttggtatttttattggaaaatgcaaatataggatggatagaataaattaatgcacctgctttttttgaacagaacaatatactagattttaaagagccacttgtgtggcaaatgtatttatgttttaaattaaatttggaaagttttttgtctataatttcaatagaatcatctgatgttgtaataaataatatatcgttttcataaattatatctctcaaattgctgtaaatctttgtttttgttaaatttattgattctaataaagataattgattccttccataaaagcctgaaacacaataaccttttgataaaaaataatttgccaaagatgttccaacttttccagaaccaataaagcctattttaatagtatcacctccactttgtgatacaacatcttaatttctaatctcattcctgaggatatgagttacataagacaaaataattaaaaacatttaaagtatagttcttataacaagataccatccataaatatcttaccattttcataaaaaattgacaattaattctataaaatttatataataaaatatcagtaaaaaaattatgatatttataaaatataagttttttgttttactatatatattaaaagtgattaagtctattagaaaaattatgatgtttttagaaattaatgctttttaacttcaatagtatcaataatactgattttttataaaaatttaaaacaataataaaatatataatttatttttgtggacaatttgtcaagattagtaccaagttaaaatttaatataagagagagatgtattatgtaatattaattttttttaaattggtaatactatattgctgtatttttttttatcaattataatttaaaatatgaaataataaactttctaattaaattaaggtatttagtgtgtatgtataagttataagtaaatcttctaaaaagaataattttaacagtgttgttataaagagcagtaactatggaggagataagtatatgaacaaacgtaattttgaagttatattaaatcaactacagattaatatatatgttacaaatattcatactaatgaaattatttttatgaacaagaaaatgaaagaagaatataatattttagatccagaaggaaaagtttgctggcaagtattatatcctgagcaaaattctacttgtagtttttgtaaagttttagaactattaaagaatgataaaaaaggagtattaataaagtggtatgaaaaatgtaataagttaaatcgtgtttttgaaaattatgatagtttaattacatggcaagatggcacagttgttcatatgcatcaatcaatagatattgcaaactcaacaatcttaaataaaccaattaagattaatgaatttaatgaaatatcaaatactaaagaaggaaaaggagtttttaatttttcaagagacaattttgattataattctacattgctttatgatgctttgattagaggtacagatgaatatatatacatttgtaatatgaaaacaggcgtatttcgatattcaccatcacaagttgaattatttgacttaccaggagaaattgttgaaaatccgcttatttactggaaaaaaattgtacatccagaagactggaatcgtttttataagtcaaacactgaaataggtaaaaaccagatggattatcatacagtggaatttagggctaaaaatcgtagtggagaatatatatggttaagatgtagaggacaactaatgcgtgatgaatttggagaaccaagtatttttgcaggaataatgacgcaattaggtaaacaaaataagattgattcattgacacagttactgaattatcatgaatttatgagtgtatttgaagataaaatttcaaatcctatgattgaaaaattatgcatagtattattaaatattgacgattttaaaaatgttaatgagatgtatgatagggattttggagataatataataaaaacactagcacagtctatacaatctattttaccagataatgctgaactttataaacttgatggggacgaaatgggtattcttgttgataatgttgaagaaaatgaaattctaactctatataatcaaatacagaatatgattatacaccttcaactatggagaaaatatggattaaatataacaatttctgctggttgtgtaatatatccaaaacatggagatacagtaaaagaactttataaatgcgctagttactctttacaatatgcgaaagagcatggtaaaaacaggcttgtttttttctcccaagaaatattaaaaaataaaatgtattcattagaaatgatgcgggatttaaaggcatcaattaatgatgattttaggggatttagtcttcgattccagccacaagtagatacacaaagtcataaaataataggtgtagaagttcttttaaggtggactaatgacaaatgcaaagcaatttctcctttggaatttattccaatattagaagaaaatgatatgataaatattgtaggggcttgggtgcttcgaatggcattacgtacttttaggaaatggattgattactatcctttttttaaagtgagtgtaaacgtttcagctgttcaaatattagaagacacatttattgaagatatagtaaaaattatagatgatgaaaattttccttatcaaaatcttgttttagaattgacagaaagtcatacagtacaaaatatgagtattttacagtttaaatttaaggctttacaagatttaggaatttatattgctatggatgattttggtactggatactcgtctctagaagttttaaaattttctccaatagatatagtgaaaattgatagagtatttgttaaagatatattaaagagtaagtttgatgctacatttatacattttattgttgcaatttgtcatgatgtaggaataaaagtatgtttagaaggtgtagaaacacaagaagagtatgatttagttaaacaaataaagccagattacatacaaggatatttatttggaaaaccgcagacagcaacagaaatctttgaccttttaaagctagataattaattctaatttatcaataatatcactgaaaagctttaaaatcaaaaatacattaaattattatattgaagatatatcaattataaattgcaatataagaaaatagcatttcaagggatgttaaattaggagtagtatatgattaaagtattttaaaaagggataactataataaaaatagatatctatttttagattaaaaataatatatcataaataaaataataagaggtagatacagttttaagggaatacaaaagtttttaattaaactatgcttgttcagatagatatttatttaagaaaaaagactattaaaagcaatatacaagaatgatatattagattgattaaacaagcataaatattatgtaaaaaactttaagttatagaatttaaatccaatgtagatagattacgttttttcttgcttttattatggtataaattggtatcaatattcaaaagtaatatatttatgatataataaaattatagaaattttgcagtgagctatatttgtgataaaatttggcgtaacagttgaaatataaggtgttgagagtgcatgataagcgttatcaattgcactattgctcgttcactgcaaatttaggagagttgtatacgtgtaagtgttgaaaatactaagtttattttggggttttatattaactatatggaatgtaaatctcggagaatttcctaatgtggatttaataggaagtgttttatattaactatatggaatgtaaattttagcaaatttttcgtaaaagtcactattttcaatggttttatattaactatatggaatgtaaatacatataaaactttcatcttctgttaattcattaaaacgttttatattaactatatggaatgtaaatccatcttttgttgttttacataaatttatattacttacgttttatactaactatacggaatataaatttttataattttcttttaatgtgttatcttatgattatctagttatattagcatacaaaaatataataaaattacactatattataaaaaccaaaaggtagtatagaaatcctattacctttttattattaattttatcagtgttttattataaatagcttacataattacacattttttctgattaaataatatgatgctattgttataatagatactaatgctaatgatgttattgcagtatctaatcttcttattaataaactcatttctatatattcaagttctattaaatattgataaaatatttctagtttaacagctttttctctatctatatttccatactttaactctaatttatctaaagattttttattacaataattaactttatgtttaattaaatatcttattgtagcacctattacaattttcactctaacaagcataaatataatattccatccaaaagttaagaggggatatcttttttatgagaggaatggataaaatatttataactgacatctaactgatatttaagctttaaaatcaaaaccatattgattttctaaaataataactacttgatttagtaaataataaagaatatagtaactatatagacaacaaaaagaaaaggagtgtataacccttggaaaaacagtattttacaacaggtgaatttgctaaattgtgtggtatatctaagcagacattaattttctatgacaaaataggtattttttctcctgaatataaagataaaaataattatagatattactcagtttatcaatatgatacacttgatatattacaatcattaagagaaataggaatgagtttagaggaaataaaagagtatatacaaaatagaactccccagctttgtgtgaaaatgcttaaagaagaagaaaaaaagataagagaaaaaataaaaaaactaagaaagataagctctaagatgcaaaatagaataaatataacagttgaaggaatttctaaaatgaatagtgaagaaatttatatatccaaaaagtttgaagaatatttagttctatcaagcgatttgagtaatatgagtaatagtgattttatgatggaattaatagatttcaccaattattgtaaatcgaaaaatttgtatcaaggatatgagttgggagtaatagtaagtaatgaaaatataaaaaatggggactatttaagtatatcaagtttttatttgaagatagataaaaaaataaaggataaaaagctatatgtaaagccagaaggaatgtatgcttgcataaaacatattggaaaatatgaggattcatataaatcttacgaaaaattgaaaaaatatatatatgaaaatgaatataaaattattggaaattcgtatgaggagagtatacttgactttttttgtgaaagtaatgaagataattatatgactgaaatttcaattcaagtatccagataagaattaaaatagagatatattcaaatgttaagtaattttacttatcattgaatatatctctatgctttataataaagtatataaatttttaaatagtttctctaatatatgtctaatgtcagttaatactaattatataaataaattgtaaactgtagttgttaaaaaacaaacaacaaaagcaagtatagtaggcattaagaatcctaaggcagtccattttaaactaccagtttctttttttattgttaaaagtgttgttgcacaaggccaatgcagtaaactgaacagcataacatttaaagctgtcaaataagtccatccatgttctctaagaacttgacctaaagcactaaagctatctaattctatcatagaaccagttgctaggtaagccattaaaagtataggtacaactatctcatttgctgggaatccaagaataaaagcaagtaatataaaaccatcaagaccaattaatttagctaaagggtctaaaaagtttgcaacatgtgataatatgcttaaatctcctatatatatatttgcaaatatccaagttatgacaccagcaggtatggctaccattacagcccttcctaaaacaaatattgttctatctattatagaggtatataaagttcttcctatttgaggaactctataaggaggaagttctaatgtaaatgtagacggaactccttttaatagcgtcttagaaagagtataagaaaccaacaatgttattataacacctagaattatcagtaaagttatgcaaagtgcagttgctacgcttgatacgaaagagttggttataactgagctaaaaaatattgtagatatagctatcaaagtaggaaaacgaccattacaaggaacaaagttgtttgtaagtatagctataagtctttcccttggagagtcaattatcctacaaccaataactccagctgcattacatccaaatcccatacacatagtcaaacactgttttccatgtgcacaagcttttttaaataggtggtctaagttaaatgcaactcttggcaaatatccaaaatcctcaagtagggtaaataatggaaaaaatattgccataggaggtagcattacagagattacccatgctaatgttctgtataatcctaaaaccaacatatcatttaaccatgatggacaattaatactatttaatatacccgaaatacttggctcaaatccgagtaataaattagataataaagtggatggatagttagccccttctatagtaatccacaatatagtacctaataataagagcattattggaagcccaaatattttagatgttaatattttatctactttttcttctctatcagttgattttttagcaacattagaacaacactcatcactcagttttttagcataatcatagttgattttagtaaactcatctcttattttctgtttatttatattgtctggaatctttttctttacttcattaatagcatctatagaatctttgtctatataattactcatagattcaaatatactttcatcgccatcaataagtctaagtcccaaccatctagaatttatacctggtataatattatccaattctggttgaattgattttaccacattctctatattttcattgtatctaacaggtttattatttaatttgtatttgtcaaaagatacatcatttaaagtatccaatagttcatccataccagagccatttcttgcagcagttaaaataactggaataccaagagaatcctctaaaagttttttatcaatagtaatgcctttttttctagcttcatctattaaattaatacacaaaataactttatctgtaagttccatcacttgaaatactaaatttaaatttctttcaagacatgtagcatcacatactactattactgcatctggattaccaaaacatataaaatcacgagctacaatttcttcttgtgataaggcaaataaagaatatgttcctggtaaatctattaatgcatattcggtatttttatatttaaaattaccacgagctgtagctacagtttttcctggccagtttccagtatgctgtctaagccctgtaagatgattaaatacagtacttttacctgtatttggattgccagccaatgcaattacaaactggtcttccttattgtctatatcaaacatatcttttaaagaactcattttagttgagttatgtgtcaaccccatattaatatcctcctgctagaaatttttaaatgtcagaaactaatattaagctactttcttcttgtcgtagagctatcttactacctctgattttatagacagttaaattattttttggaccttttctaactacatctataacagctcctctagtaagaccaagcgctaacattctttctcttaaattaccactagataatatatcttcaactttgacagtttttttcacttgaatatcgttaaggtttttcatagtagcacctccatgcttgaaatttagcctgggctaatcttcttattctaaactatgcattatattattaccttgttacttttacaaaaaaaagataggcaagatgcctatcatacaaagttgggtataattcttacttttggggaaagtagaatatagaataaaaattaacactttgaatccatataattattgaattttgataataaaaaagtcagaaagcaaaagcctcctgactctatgtaaggtattttcaaatacctaaatatcaattcaatatttaatttatacttaaattatatattaacaatattagcttgtcaacactataatctcattttaatatgttcaatacctgcttcgtcgtatacttctgagatttctttaaaaccacaagataagtaaaggttctttatataagtttgtgctgataaggttatattattttcgtgtaagttaatttttataaaatctatagcacaatccatcatttgttttgctaatccttttcttctatgactagaaagaactaaaactctaccaatggaaacatcattataagagctgtattctttaggaattattctagcataagcacaaatcaatccattttcttttaaaaatatgtgataagagcttttatctatatcatcataatcgtttaatgaaaatatcttctgttcacaagcaaatacctcatatcttgattttgctatttcataaaattcatctaaactcaaatcattaaagtgtttaattttaaacatagtaattacctcctagcatcttaaaaaactgaatattaagatacattataccatttttaacataaatacctttattaaaatttatatttattaaaaatatttttaaaaagtgatatactatattaaaaacaaaactttagttagaaaatttatgatttatggaggcagtgttttgaatactactaaaaaattaactgaagcagctttattgtcatctttattcatagtagtaacaattatagctgtgagtactggatttggatatgctatttacttagattttatagtgccagtatttttttgtataatctgcttgaaatgtgatttaaagtataccattttatctggaattacttcacttttaataatttctctggtacttggaaatctaggaactgctatttgggcaagtcagagtgtattacttggtataatgtgtggctatctaataaataagcctacaatggttatggatgatttagtatatggttcagtatttggggttattgtaatggttttcattgatatatatgcttcaacattaataggttatagttttatgaaagaatttcaaggatatagcaaatggatttattttaatgggtatacaaattttatttattatttaatgatagcattgtttccttttggtatggtgttttgcatatatttattaagtttaattttagggaataaattgcatattttagattctaattctttaaaaaaatttttaatatttaagaattttagaagtttaaaccaatttttatgttgctcaaaaaaagctttttacatatgtgtttcttatctagccatttttgaagttctaaaactgttgaatgttaaagttgattctgtttatttaaaaacaatctttatatcaataacctatataagtgtctattttatcattagagactcatgtatgtcactacaaaactttataatagctaagtttagaaaattattatatgctagaattttatttttgataataattttattgctgttttttatatttgatgtaacagttattagtttaataattataaacgcatttttaaataagaaaataaatataagattgagtcagagtaatatagtcaataaacaaataaatcttttgattgaaaaataaactttgggtattggtaaaaaatataaaaaagtagtataatgtaaaaaaacatgtatataataataaaaaaggttgacaaaatataaaaataataatatattatgagtaagttaagaaaaatttcttgtaattgatgaaataatctgaatatataaatgctatgaagagaagaagtagggctagattttatttaacagagagttccagtttggtgaaatggaataaattgatttagtttgaatacatctcagagcactatctctgaaagataacaaccattaagagatatcggattagtacacgttatagtacacgagtatatgtaattgtactctaagagattaatatcgtgagatattgatgaactaaggtggtaacacgtaagcaatgctttcgtccttttaagaggatgaaagctttttttattataaaaaaaaaattatagattatataaatattttaggaggaatgaaaaatgaaatcgatagacgagcaaatgcgaataattatgaaaggtgtagatgatttaatagatgagaaagagttaagggaaaagcttattaaatcagaaaaagaaggaaagcctatgatagtaaaattgggtctagacccaagtgctccagatatacatttagggcatacagtagttcttagaaagatgaaacaattacaagatttaggtcatcaaatagtaataataattggagattttacaggaaaaattggagacccaactggaaaatctaaagctagaaaagctttaacaacagagcaagttcttgcaaatgcaaaaacttatgaagaacaaattttcaaagttttagataaagaaaaaactattgtaagatttaatagcgagtggttagccaagttaaattttgaagatgtaataaaattagcagcaactattactgttgcgagaatgttagaaagagaagattttaaaaagagatatgaaggacaaatgccaatatcagtacatgagttcttctacccattaatgcaagcatatgactctatagcattagaagctgatatagaacttggtggaactgaccaaagattcaatttactaatgggaagatcattacaaagagaatttggtatggagtctcaaatagtaataatgatgcctttaatagaaggattagatggtaaagaaaaaatgagtaagagtttaggtaactatattggaatagatgaagaagcgggaataatgtaccaaaaatctatggaaattcctgatgaacttataattaaatactacaatttagtgacagatgttcatcctgatgaagttaataaaatagaatctcagttgaaagagggttcagtaaatccaagagatataaagatgaacttagcaagagaaatagtaacattataccatggagaagaatctgctaaagaagctgaagaaagatttaaatctgtattccaaaaaggtcaaatacctgaagatatacaaacaattcaagttaaggaagatggatttgacttaatcgaagtactagtttctaatgagattgttaagagtaagagtgaagttagaagattagcttctcaaggtggagtaaaggtaaatggtgaaaaagtagaggatttaagcactattgtaaaagagagtgaattagttgttcaaataggaaagaaaaaatttgtaaaaatcgagctagtaaaatagagtaaagtaaaagcaagtctattgagtataaaatgtacattcaataaacttgcttttttattatattaaaattttaaattgataaccattgtctttaaaatatgttataatttggtccaatgcatttactgtttcttgttttccataagtatcatgcattaaaagaacaaccatttctttgccttcagaagatttctttgcatgttcaaataattcttgtgcatttttctttttaccttctgcatcagcatttaaagcgttccaatcaattgatgccatgtttttctcttttaagtagtttcctagaggttccatatttttccatgacatatacccgcctgggcatctaactacatttgaggaaaaattctttcctaagacttttttcatagcttcatcagttttgttaagttcatttacgaatgtatcgagatttaggcttctgccaggatatagttttttatagtcatgggtataagagtgatgggctattgcatttccttcgtcaaatgttctttttaaaatttcattagctccttttctttcaagagaatcacccttaataaagaaagttcctctaacaccatgtcttttcaagatatctagaacttgtggagtattagtagtagatggtccatcatcaaatgtaagaaagactatcttttctccattgtttgaatagtcgtatttgttaagtttgtcccaaactatttttgcgtcatatccatattcttttacagcttctttttttgcaccaataataggttcatttttttctttttcaattctttctttttctaatctttcagctttaagtctttcttgagtttctttcatttctttttttctagacatgtccgcccatgccatagaaaaaataccaataactattacaacaagtatagtaagtgtaacagttttcttttttcttttttttaccataattacagcattcccccttttgtcgaattgtatcaaaaatatattataattatatcgaagaaagtagaaaaagtaaaccgacaaagttgtaactaagataactaaagtgtaacttatatgacattatttgcataatattaaagtatcatatatattaaaaatatctataaaaaaatttagtataggtaaaaaaatataaaaaatataaaaatttattaaaaaggtgtttacaaaaaatgattaatatattactgttaaatagtggatataaatttgagctcaaaatgtatgtaaatttagatttaaaatactgaaaaaatttactatattaatttatagtaatgcttatagaaaaactctcttgctgtttagggggtttataattttgcaaaaaaataaaaaggagggggctttattgaaaaaatactttggagaaataggactaatatttatagcaattatatggggaagtggctttgtagcaacccaatttgcattagacggtgggcttacacctctacaaatcataactttaagatttttcttggcagctataattatgaatttactgttttttaaacagattcgtgccaatatgggtaaaaaattattaaaagcaggagggattttaggaatatttttatttctagcattcacagtacaaactattggacttatgtacactacaccatctaaaaatgcatttataacagcagctaatgttgtaatagttccgttcataggatttatactttatagaagaaaacttgataaaataggaataataagtagtttggtagctcttataggaattgggatactttctttagaagctgatttctctattaattttggagattttctaacacttatatgttcattcggatttgcatttcatatattctttacaagtgagtttgcaaaagataacaacccaatggcattgacagctattcaatttacagtagcgtttttaatgtctgttgtagttcaaacatttgcaggtcaattaaagatggaagctgaattatctggttatatgggaactatgtatctagctgtatttagtactacaattggatttttatttcagactatatgtcaaaaaagagttgatggaactagaacagctataatattatccacagaggctgtatttggtacaatattttctataataattctaaaggaacttattacagcaaaattgattattggtagtatcttgatatttgttgcaatcataactgcagaaactaaattatcttttttaaagagcaaaaaagtgaaacttaaagattcagaggagtcttcattagaaagtatttaatatgacaactatttcctaattaatcaaataagttatgtattatgtagaaatttgacatcaaaacttggttgatactggtgtttcaaagtgataaaattaattaggaaataaattttatttttagtgtttaagctataaagtctggggtatatatattcttgtagcaagttattaaacttaaaaataaaaatttaattatataaaattgggaggaaattaattatgaaaaaatttgtttgtacagtatgtggatatatacatgaaggagatgctgcaccagcacaatgtccagtatgtaaagttggagctgataaatttgaagaaatgaaaggcgaaatggtttgggctgatgaacatagaataggagtagctcaaggtgtagatgcagaaataatcgaaggattaagagctaactttactggtgagtgtacagaagtaggaatgtatttagcaatgagtagacaagctgatagagaaggttatccagaagtagctgaagcatataagagaatagcttttgaagaggctgaacatgctgctaaatttgcagaacttcttggagaagttgtagttgcagatacaaaagaaaacttaagagttagagttgatgctgagtatggtgcaactgatggaaaattaaaattagctaagagagctaaagaattaggattagatgctatacatgatacagtacatgaaatgtgtaaagacgaagctagacatggtaaagcattcttaggattattaaacagacattttggaaaataataattaaaacatagattaaaaggagaaactttggtttctccttttttaaattatacaaataaactgttgtgatagaaggatggagataatatgaagtcggtatctgttaggagttgtaaaacttacaattatgaagaagtaaagttatctattgaaaaaaatttagaggatattggtggtatagataagtttgttaaaaaaggaagcaaagtacttataaaaccaaatttattaatgaaaaaaaagcctgaagaagctacaactacacatcctatggttgtaaaagttgtatgtgaaaaacttttagagttaaattgtgatattacaatagcagatagccctggtggtccatataatcaaaattctcttaagagcatttataaggcatctggaattgaagaagtagcaaatgaactgggcattaagttaaattatgatgtttcagatgttaagatacatagtaaaaaagcacatgttctaaaatatatggatattattaaaccaatagtagattcagattatataataaatctttgtaaattaaagactcatataatggcaacctttactggtggtacaaaaaacttatatggatgcatagcaggattgaaaaaagcagagatacattatagatttcctacagaagagttgttttgcgaaaatgtacttttagatatttgtgattatataaaaccaacattgacaattatggatggtatagtaggtatggaaggtgatggaccttcagctggtactactcgagaaataggagttttattagcatcacaaaatccatatgctatagatgttgttgcatgtaagattataagtttacttccaaatagagttgctacaattagaggtgctattaagagaggctatatacaagaagatttttcagatattgaaattttaggtgaagatataaaagatttaattataaaaaattacaagattccaaatgtaagtaaggatttaagattgttttccgtaaagctaccaaaatttttaaatgaacctatttcaaagcttataacaccaaagcctgtggtaagatttcaagattgcataaaatgtggaaaatgcaaggaagcttgtcctgcatccactatagagatagggactaaaggtgctattatagacttaagtaaatgtataagatgttactgttgccatgaactttgtcctaaaaaggctattgatgtcaaacgtaattttgtatttaagtatgtaaaataatgtataatattatatgagtctatataaattaaaaatataaaggagaaataatatgattttaattaaaaatggtagagtaatagaccctaaaagtcaaagagatgagaatattgacttaattataaaagaaaataaaatttataaaataggcaagtttgatgaaagtgatgaatatgaaaaaataatagatgctagtggtaatgtagttgctccaggtttagtggatgtacatgtacactttagagaccctgggtttacatataaagaagatatagaaagtggagctaaatctgctgctagaggtggatttacaactgttatatgtatggcaaatactaatcctattgtagataatgaagatacttttaattatgttaaagaaaagtcaaaaaatgcatgtataaatgttttacaagcagcagctataactaaaggttttgaaggtaaagagttagttgatatggaagctcttaaaaaagctggtgtaccagggtttactgatgatggattacctttaatggatagcaatctaattatggaggcaatgattaaggcaaaagagttggatgtaccacttagttttcatgaagaagacccttctttagttggaaatccaggtgtaaatgcaggaaaggtagcttcagaactaggattaaaaggtgcatcaagtgtagcagaagatgttatggtagccagagattgtatgttggcactaaagactggtgctaaagttgatatacaacatataagttcaggtgtatctgttgatatggttaggtttgcaaaatacttaggtgcaaatgtagttgcagaagcttcaccacatcactttacattgactgaggaagatgtattggagtttggaacaaatgcaaaaatgaatccacctctaagaagtaaatgggacagagataagattatagagggattaaatgatggtactattgaaataatagcaacggaccatgcacctcatagtaaagaagaaaaagatagagagtttataaaagctccaagtggaattattgggcttgaaacttctttagctcttggaataacaaatttggtgcataaaaatcatcttagtatgatgcagttaatagaaaaaatgtctataaatcctgcaaagttgtacaatttaaatattggatttatagaagaaggggctgtagcagacattgttatattcaatccagaagaagaatggacagttgaaagctttgtttctaaagctgataattcaccgtttaaaggtaaatctttatatggaaaggttaattatacaatatgtaatggggagattgtatataacgcctaatttaagattatttttttaaggcggagtgtacaatgattgaaagtaaaagattgtatatcagcagaatgagattgattaatcaaaattggaagtattagtttgaacaattagaacataacatcttggtaatttagatatagtaaggaagagaatcctttttatgaaagaacgcactattatatttggaaagattaagttcctaatctatcatatataatagtgcgttatatatttaagtatgttttatataaactaatctaaaaatcgaaaatctttatacaatttctacttataaattgcctttatagggtctagtttagaagctttaaaggctggaatcagaccaaatacaactccagtcaatatagtagctacaattgcataaaataagctatttaagctaggtatagcttcaaaacctatatatttagaaacatagttagtagcagcaaatccaactatagttcctaaaattccaccacatactgttataaaaacagcttcaactaaaaattgaaataatatagacctaggttttgctccaatagcacgtcttataccaatttctctttgtctttccataacagatacatacattatattcattacaccaataccaccaacaaacattgcaactacagttattatagatacatatttgtttacattggaattaatgctttcaagataagctgtctgttcagttgggtctggtgtagtataagaaccattgataccagggtgcatctcatataatttagctataacattgtttgcaacttcatttacattatagcctttagaagaaactaagtctaactggtaaatttcatttgaataagaattttgactcattaaagtgtcaaaagcctttttaggtactagggaagtagtaaattgcatatcttggtaacctccaaagaatcctccagcttggttttgctgagaatcatctaatacccctattatttcaaatatagttccatttatgttgataccatgacctaaggcatcttctggattttcaaaaatttcacttgtactttgtaatgtaagtaaaattacttttcttttttcatcatctaaagaaaaatctctaccacaaattaaatttattttagaatctttttttactggtccaacatcaacatacgtagtttttttatcaaaagatgcttgtgaagagtaaactgaatcaaggttaaacccatctcttgaaggagctattctttctactccttcaacaaatgataattcttctaaatcttttgcattaaagggttttaaaaaaatactcatatcatcagtaagacctgtgttatcggctgattcaaacgaaatagtagttttattagggtttacattgtttacagatttcttaatttctttttgaaatccattacctatagaactaacaagtattactgaagttattcctattataatccagagtaaagctacaaatacacgaagcttgtgaccttttaaattggccaaagaattttttaataaactcatgattacacctccgaagtaaacacaccatctttaagtcgtataaccttagttgcatacttagttaaatcttgatcatgtgtaaccattattatagtcttaccttgtttgttgagccttgttaaaagctccataatttctctgctagtttcactatctaatgccccagtcggttcatcagcaaagattatctgagggtcatttactaggcaacgtgcaatggctacacgctgttgttgaccaccagataattgaagtggtttctgcttaagcttgtccaaaagcccaacagaacttaatttatctttaacaatttcttctctattagatttttttagtgctttattgtaaattagaggcaactctacattttgatatacatttagagtttctattaaattaaattgttggaaaacaaatccaatattaatatttctaaaaacagaacgttcattttcactcaaattagttacatctgttccatcaaatatatatcttccttcatcaaatacatctagaaaacctaagatattaagtaaagtagttttaccactaccagacttacccattatcatgacaaattctccagattcaatttctaaatttaaggattttaaaacatgtaattcatctttccctactttgtaatatttttgaatattttctaatttaattaacatatgtaaattaattcacatccatagtaacttcttctacttttttgtttggagtagtatctccattattagaaccagcagttacgccatcgccttgaactgggtctccttctttcatttctttagtagggtgttttattattatatcgccttgttcaagaccgcctctaactacagcaaaatcatcattttgacttgctacatctacaatttgctttttcaatataccatctaaatccttaaatacatatgagtgtttgttgtctttaagtacacaagatgctggtattttaaagcttgaattagctacttcaagtgatgcttgaagatggaatccatttactaatccttcttgattatcaaatgctatgtttatatcataataagatagtgtattctgctgagctcccatttcagtatttggagtagatggtttatcagatataaaacttattctaccagtaagcttttggtcagttgaaaaaactagtatattgaccatttggtcaatcttcattttaggtaaatcttgttcacttgcttgtcctttcatataaaactctagaccttgaatagtcataaatgaaactggttggtctggatttccagtttggtcattcaagtatactgtgccatcaaaaggagcagtaactctgtcataagcttttttatccagagaagctatctgagagtttaaagcagttatctgtgcatttatagaagcaatagcatctttattttcagcaatatcagaaagtgatattttttgttttttgtattgactaagttgtgattttaaactatctatttctgctattatagttggatttttagcagtaaaaagaaggtctccttgatttactttttgaccatttgtaacattaacatcacttaactcataatctccagatatattgaagtccttagtttgcttaggaacaaccatcccatttataaatattttttcattttcaggaatagtatatgtttcgataaaattttcattagcttgtaattcagtgtttttcgaatcaacataagcaagaactcctagaattaaaagtatgattactgctattcctgcatatattttgaatctcttatttttaaagggattgtttttaaaacctttatttttagacttgaagccactacttccaaaactgctatttctaaagttgttacttttaaaactgttatttctaaatcttttatttttaaatttttttagaaaagacatgtcttcctcctttttataaaaactacttaattatatactgggatgtacatatagaattactataagaagttgaatataagttaatgaaaataaactatcaataataagatactataaatcacatttgaatgtaatagtaaattttgtatattggttgtactctgaatctacatcaattttatgaccaagcttatcacaaagttcttttactaaataaagcccaagacctgtagatttagaattgtttcttccattattacctgtaaatcccttattgaatattcgatttaaatcttccttttttataccacaaccagtatcttccactcttaattgtaaataatttttggttcttttgcaatagatagatatattatctcctaatgaggagtattttagggaattactcaataattgctcgaatatgaagtatagccatttttcatcagataaaaccttaaaattcaaattatttaagtctaaaataattttttttgaaataaaatattttgagtatttttttataatatttctaatgattttttcaatatttacctcttgaattaaaaaatccttatgaaaatcttcgagtcttgataaatataaaattttttcaacggagttttcaattctaaatatttcactatctatgtcatctgaaattttttcattaattaaattttcattttgttcaagaatgagttttattatagctataggtatctttacatcgtgtacccacatatttaaaatctctttgttttcttcaaatttctcgatattattatttattatgttattacattgatattgatgatttttaataatgttcaagtatattttttcttcatttttacatctagctaattctatatcattcatattaattttgaatgtatcattttttatcttatctaaaaatttgttcttcttgatgtagctaataaatagatataaaaataaaaacacaacatttacaactaatatatataaaatagtatcagtcagaaaaacatctacaggagaaaatataataactgatactgtaaaaattaagaaagtaaaattgtatactaaaaaacctagtttatccttgagaaaatctttaaagctcataaattcacctacttagaattgttttaactgattatataacccaatcctctttttgtttctataaaatcttctaaaccaatttcatttaattttgagcgtattctatttacattgacagttaatgtattatcatctacaaaccaatcattatcccataattttttcatgagtttattcctacttactatctgccccttatatttcataagctcatgaagaattttgatttcattttttgttagctcaatagtattatcttcatagtttattgttgcagttgataaatctaaagtaacaccattgtgaataatctgatttgagttattatcaacaaaattataagttcttcttaaaagggcattaactttagctactaagacatctacagaaaaaggtttttgtatataatcatctgcacctaaatttacacccattattacatccatattagaatttcttgaagaaataaaaattataggaacttttgaaatttttcttatttcattacaccaatgaaaaccatcataaaatggaaggtttatgtccaataaaactaattctgggttatagtttttgaactcttctattatattttcaagattttctatttgatgaacatcatgtccccatttagtaagacactttgctatgatatttttcaatgagacgtcatcttcaactaccattattttaaacattcttacctcctaattcaaaatagttatattaacataactatattctacttgataaattaaaatatttctaccttattacctaaaataattatattaatataactatattttacttgataaattatattttaaacataattgcaataaatttgaagaaatataattaatacttacgaaaatgtaaccttaaattaatataattaaatgtttaaaagccattttaatatatataatatatttgtgagaattgataaataactaattgtgatgaaaggtgattattaactatggaagaaatattatctgttgaaaatataaaaaaggagtatggaagaaaaggttcaaaacatgaagctctaaaaggaataactttcaaggtttataaaggagaatttgttggtattatggggtcttccggtgctggtaaatcaacacttttaaatattatttctacaatggatttaccttcatcaggagatatttatataaatggaaagaatactattaaaatgaagcaaaatgaattggcagattttagacgtgataatctaggctttgtatttcaagattctaatcttttggatacacttacaataaaagaaaatataatgttgcctctttctttaaaaaatgaaagagtatcagtaatagaaaatagaataaaagagatttcaaaagaattaaatatagaatctatattagataaatatcctggcgaagtttctggtggacaaaagcaaagaggagctgtatgtagagctatagcaacaaaaccatcattagtacttgcagatgagcctacaggagcattagattctaaatctgctagggatttgttgaattgtctattaaaattaaacaaagacagcaataaaacaatattgatggtaactcatgatgctataagtgcgagtttttgcaatagaatactctttataaaggatggaataatattcacagaaattgtaaagggagaaagtaacagagagttctataataaaatagtaaatacagtttccttaattggaggagttaataaaaatgactttatttagaattgcaatgcaaaatgtaaagaatagtttttttaattatttaatgtactttatttcaattgtatttagtgtatttgtattttttagttttaaatctatagagtataatgaagcgttgagttcacttggagaaaaaactaggatgagtattaatacaagttcaattgtaatagtggtatttgtatttttatttatatattattcaaactcattttttttcaatagacgtaggcgagaagtaggaacttatagtttacttggaatgaggaaaaatcagataggaaaaatatttttatatgaaacttttttgatgggtatagttgcaatactaataggtatatttttaggactgttattttcaaagcttatgactatgatgcttgtaaaattaatgaatgaaatgatagtagtaaatatgaacttaagtataaaggccttagttaagacactagcggtatttttaataatatttatagttattggaataagaaatactatagttatcagaaataagagaattatagagttatttaataaatatccagaaaagtataagtttaaaaaatttataaagttaaaatgtgtacttggtgttttattaatagctatttcttatttaatgtcaattagttattttattgctgaaaatattatgctttcagtttttatattagttacaataatacctggaacttttttatttttttcatcaactatgtatatgattattgatgctgttaagaagagaaaaagtttttattataagggacagaatttaattgcattttctgaacttggatttaaattaaagagcaatagtagtgtattggctgtaatagcaatattaatagctacgagtgtaactatgctagggtttaccatatcactttattacgatatagataggaacataagtgaaaattataaatacagttataccataaatttaggaaattcttatgtaaataacgaaattgacaaattattatataaatataaaaaagataataagataatctttgataaaacaatagaacttatagacaaagatataaatattgaaatgtattataaaaatggaaatagttatatagaagatagaacttctgtagatattattagagaaagtgattttaaaaaattaagacaatatcagaataacaattatgaagaattaacttcaaaggaatctgtgtactatgtttctgattcatacaaaaaaatgttttttaaagactttgagattgaaaaaataaacttgtatattaaagatacaaatgagtatgatataaatctgtttaaggtacaaaaaagcatcttggagccagaaataaattcacaagctacgtttgatttaattgtagtaaaagatgacgtatttaatcagttaaaattacatggaaattctagattaataagattaattgatataaaaaatgaaaaaaaagaactggatttgactttaaaatttaaaaatatagtaagtgaaaatatgaaatttacttatccttttaattttacatcaagtattgaaagttataataacttgataaaattaagtggtctaatgctgtttataggcatatttttgtctgtagtatttcttttatgtacaggtagtataatcttatttaaacaattatcaaatatatatgatgataaggaaagatatattatgttaataaaacttggagcaaataataaagatattgagaaaataatatcaaaacagttaaaaattatatttttaatgccattagttgtaggtacagttcataatttatttgctatgtctatagcacaaaagtttataccaaggtcattacttgtaccaattatcataactctagtcatttattttataggatattttatatattattttttaactttaaaatatgctctaaacatgataaaagaataaattatttttaagtcaaaagaattagatatatgttttgaataaaataacttatttaagtgcagatagaaaatactagaattgagtttaagatatttatttaaagataaaattaaagttaggaaaaagtctatattttatatcattttgtatcagttacattacttgatgttatataataaatctaagcagaatatcaaataaaaaatgacgaggagctgaaatttatgaagtttaatgcctaccaacataaatactcatcaataagaaatgtcgtgtatgctaaaaatggagcagttgcaacatcaacaccattagcatctcaagctggacttgaaatactaaaaaagggtggaaatgctgttgatgcagcagttgcaacagccgccacattagcagtagtagaacctacaagcaatgggattggaggagatgcatatgcccttgtttggatagaggaagaaaaacgattgtatggtttaaattctagtggctttgctccagaaaatatggaattaaaaaattataataatatgaaagaaatgccaaaatatgggtttggagcagtaactgtacctggaatacccgcagcttggtcagaattaaataaaaaatatggtaaacttagcttaatggaatgcttatctccagcgataaactatgcaagagagggatacgtagtatctcctaatgtagctaaggtatggaaaaaatcatatgaactctatgaaaaagaacttattggagaagagttcaaaccatggtttgatacattttctaaagatggtaaagctccagaggctggagatatatttatatgtgaagaacaggcaagtacattagaagagatagcaaatactcaggctgaaagcttttatagaggaagacttgctgataaaatagatgaatattctaaaaaatttaatggggctataagaaagagtgacttagagtgtttttatccaacatgggtagaacctataagtacagaatataagggatataaaatatttgaaatcccaccaaatggtcatggaataacagttttaatggcacttaacatattaaaagaattggaattagaaggaaatatagaaaatgtagaagacatacataaaattatagagagtttaaaattagcttttgcagattctaaaacatatgtaactgatatagagcatatgaaggtaaagattcaggaattactaagccaagagtatgccaaaaaaagaagtttattaattgacaataaagaggctttgtatccaactgcaggagagccatattgtggtggtacagtatacctttgtactgcagataaggatggaaatatggtttcatatatacagagcaattacataaattttggttcaggaattgtgataccaagaactgggattgctttacatagtagaggaaataattttaatttagaccctaaacaccacaatgtagtaaaaccatttaaaaaaccttatcatactataatacctggatttttaggtaaagaagataaagcaataggtccatttggtgtaatgggagcttttatgcaaccacaaggacatattcaagtgttaacaaatatgattgattttggattaaatccacaagaggcgctagatgctccaagatggcagtggataaaaggaaaggaaatagaagttgaaccagagatgccaaagcatataatagattcattaattgaaaagggtcatgaaataaaagtaattcatgatactgtcgacatgggacgaggtcaaataatatttaaaacagaacaggaaagttatatttgtgggacggaatcaagatgtgatggtcatattgcagtttattaatattatcaactaaaatatatataataaatttaaagagtatatgaaataattagtaaaggcgaaagtctacaatgactgacgcctttacaaaatttaagctatcatatgctgattttatatagattatgagccttattcttgaccagttttgatttcattgtcatcataactaatccagtcactaaagctaccaatataaatcttgtgaggtatatccagttctctaagagcaagactgttaacacaagcagatatccctgaaccacaagataaaattacttcatcataattatttaaatctttaaagaatttttttaaaaattctatatctttaagtgagccattttcaaagtcactttttattaaatccttacaaaaataattttttgcacttggtatatgaccagcttttgagtaagcaggttcaactaaaccctggtatctctcattagcacggcaatctattattacagtatcttttttgtataatttagacttaacatattccattggaacaactaaatcattgtttatatttggtctaatttccttacctgtacaacttggtatattcactttctcttccaattctccaccttcctttacgaaagatgttattcccccatctagtacatagacatttttaagccccaaatgttttaattggaaaaataatctgcaagctccatttaaatctccatcatcataagttacaatcgtagtgtcattatcaacacccattttttctaatttttcttttagtattaaagggtcttgtaaaggatttttaccaccatgttcttttgtaggagatgataaatccttgtctatatctaagataaaactgcctttgatatgtccttttttataagaatcaataccataagttctattgataagatcaaatctgcaatctattacaactagattatcatttttttctagttttgatataagttcttttgctgaaataatgtttttcaaagaatgtacctcctatgtttatattatctttattttaatttatattaattattaactttataaactaatattattataatttattacataagtaaataaatctttagaaattgtaaaaattttatataaaaattcaaataattaatgaatattgaaaattttagatatataataaaataagagtatattttatataatatgaaagctggtattgcaatagattaaagccttatacacgtttagtttttaaagaaattagtgttattatgaaaacctaagttaatttattaaataaataattgaataaaaaaattttattatgtatttataaaatttttgttacaaatttggcataatatagtatactttaagtgtgtattaggttaaatctataacaaattagacgtatgatatagacttagtgtttattggcatttacaagaaatttgttaatatcaactatttgtagtttgggcagttataattactataggggggatgtccaatacaaaacaatcaaccaagaactaatattatattataaagagttatagttttgtgtgtttatgtttttaattaaatttaaagtgggaaaaatatatttgttagaatggagaatagcgagatgagtaataaaatagttagtaagagacaattaacagatagtatttatttaatggaaatagaggcacctagagttgcaaaatcttctcaaccaggtcaatttataataattaaaaatgatgaaaagggagagaggattcctcttacaatagctgactatgatagagaaaaaggaacagtaactattgtattccaaacagttggtgcttcaactaaaaagttagcaatgtttgaagaaaacgattttgtaatggattttgtagggccattaggacaagcaagtgaatttatacatgaagatatagaagaattaagaaataaaaagatattatttgtagctggtggagttggttctgctccagtttatccacaagttaaatggtttaaagagcatggattagatgtagatgtaataattggtgcaagaactaaagaattaattatattagaagatgatatgaaaaaagtagctaaaaatgtatatgtatcaacagatgatggtacatatggatttaatggaagagttacagacctattaaaagatttagttgataatcaaggtaaaaaatatgaccaagcaatagtaattggaccaatgataatgatgaaatttatgtgccaattaactaaagaactaaatatacctactatagtaagtttaaatacaataatgatagatggaacaggtatgtgtggtggttgtagagttagtgttggaaatgaaactaagtttgcatgtgtagatggtcctgaatttgatggtcatttagttgattttgatcaagcaatgagaagacagtctatgtacaagactcaagagggaagagctattctaaaacttgaagaaggcgatagtcatcatcatagtaattgtggatgtggaggtaacaaataatggatgctaaaaaagtaaaagtaccagttagagaacaagaacctgctgtgagagcaacaaattttgatgaagtatgcttagggtataataaagaagaagctatggcagaagctaatagatgtttagcttgtaaaaaaccaaaatgtgtgggtggatgtccagtaggaatcgacataccagggtttataacaaaaattaaagaagatgatatagaaggtgctgctaaagtaatagctaagagcagttcattaccagctgtttgtggtagagtatgcccacaagaaagtcaatgtgaaggtgtatgtatacttggaataaaatcagatgctgtatcaataggtaaattagaaagatttgtagcagattggtcaaaagaaaatgacataaatttatctgatacagagcctaagaaaaatcaaaaagtagcagtaataggaagtggtccagcaggtctagcttgtgctggtgatttagctaaaaaaggctatgatgtaacaatctttgaagcaatgcatgagccaggtggagttttaacttacggaatacctgagtttagacttccaaaacaagctgttgttcaacctgaaatagacaatataagaaaattaggtgtaaaaatagaaactaatgtaattgttggtaaaacaattacagtagatgaacttatagaagatgaaggatttgaagctatattcataggttcaggagctggtcttccaatgtttatgaatataccaggggaaaatgcaaatggagtgttttctgcaaatgagtttttaactagagtaaacttaatgaaggcttatagagatgactatgatacacctattagttctggtaaaaaagttgctgtagtaggtggtggaaatgttgctatggacgctgctagaactgcattaagattaggttcagaatcatatatagtttatagaagaagtgaaaaagagcttccagcaagagctgaagaagttcatcatgcaaaagaagaaggcattatatttaatacattaacaaatcctaaggaaattttagtagatgaaaatggatatgttaaaggtatggtttgtataagaatggaattaggagagccagatgattctggaagaagaagacctatagaaatagaaggttctgaatttgtacttgatgtagacacagttataatgtcacttggaacaagcccaaatccactaatatcttctacaacaaagagtcttaatataaataagaagagatgcttaataacagatgaaaatggtcagacttctaaagagggtgtatttgcaggtggagatgctgttactggagcagcaacagtaatatctgcaatgggtgctggtaaaacagcagcagcatcaatagatgaatatttaaaaacaaaagttaatgcttaatttgtaaattaaagagagggtgtctcaaaatgaactttttagttcatgaggcactttttttgtacaaaatcaaatatgttttaatcatttcaacaatgaaaatttcattcctgtagaaagtctaacttttaagtcttagtacaatctctattttgatgtaggcacttttttagatggtttaataatttatcagttattattgtaatatttgatactaagtaacataactttgtctaactatgataaaatagttatacaataaaggtcttgtaaggagtgaataatgtgtggctaataaaatcagatttgtcaaatctaacattaaataatagaaaaataaattgtgtaattaatggtattttaatatgaaaaaaagagaaaaagtatttgatgggctagtttttaagcatatattaatcttattaatactattagttttgattgatttaacaagtaccatcatatatgcaagtaactctatggaaattacttctagaaatatgattgaggcatcaaaaagagaacttgaaaactatttagaagtaaacatatctttattaaaagctcttagtcaagatgatagattttctaatggtgaaacatcactaattgaaaagggaaaattattaaggccatatcaaaaggaatataatctttttatgattggtataacagatacaaaaggaaatgcttcaagtacatatagggaaaatgttaactcaataaaagataagcctagttttgagaaagcaattaaaacaaagcaagtagtagtttcagatattgaagtcagtaatgtaacaggtgacaaagtatttatcatatatgtaccaattgtaaaaaataatgagatgattgggaccatttttgcttctttttattttcaagatgtaaataatttaataagtagaagcaattttgatgattctattaaatttctaatgatagataaagattatactattatttctcatccaaacaaaaaatatgtaaatgataaaagtaagatgcttgatttagaagggaatattataggaaccactaaaagtgaaatcttaaaaaatataaataaaaaatgtcaaggtgattttttatcttgggataattggagattatataatgtaaaatatacgaacataaagtggactaattggactttagtatcaaaatgtaatatatttaagaactttaaaaatctaatagttaattttatgataaagttgtatttttatatagtaatatttatgatattgtggaaattaagtaatgctaaattaatagaacaacttaaaaaattggcttattatgattctttaagtggaataaaaaataaagaaaagtttagaaaagattctatgtatattttaaagaattattatcaagataatttttacttagtacaattggatgtcaataaatttaaatatataaatgagatgtttggatatgctgaagggaataagatattaattcatatatcacaggttttaaataataatacaaataaatatgaaatttgtgctaggatggataatgaccattttatattgttgattgcttgtaatactgaagatgaacttttaaatagattatctaaaataaataaagaaatttgtaacttaaatactactaactcatctaagtataaaattgttatgtcaagcggaatatataagattactaaaaaggatgatattaaaaagattgacctgttaattgatagagcaaatattgcagcaaaaagtaaaaaggaaaaatatgaacattcatattcgttttttaatgaagatacaagaaatcgattgtacaaggaaaaacgattggaagataatatgaataaagctttagaaaaaggtgaatttatagtatattatcaacctaagtatagtttagatgatgtaaatgaaattgaaggagcagaagccttgataagatggaatagtccagaatttgggtttatttcacctatagattttgtacctttatttgaaaagaatggttttattgtaaatattgatatgttcgtgtttgaagaagtatgcaaaacattaaacaagtggataaataaagggtatactcctgtaccaatctctgtaaatatgtctagagttcatttatatagggataattttatagaaaatataactgatttgataagtaaatacaatatatctcctgagtttattgaacttgaactaacagaaagtgttgtgtttgataatttaaatatattgattgatataatgaaaaagattaaagagataggattccttatatcaatggatgattttggttcgggatattcatctttaaatctgttaaaagacctttcttttgatattttaaaattagatagaggatttttaatcgaaacaacagatacaaaacgtggaaaaattattatttctaagattgtggaaatggcaaaagcgattgatattaaagtaatctgtgagggcgtagaaacttatgaacaagtagagttcttgaaagagataggttgtgataaggttcaaggatacttatttgctaaacctatggtattagatgaatttgaaaaacacttaaactttaaatttgattaatcattaataattattagactataatataccctaacaacttacttacaaatatgtaagttaattgttagggtatttttatggttaaagtagtatattcacgatattatggtattgtagtaaaaataaaaaattatggagaatataaaatgaacatattgagtattagaaatatatcaaaaacatattgcggaaatattccatttaaagcattagataaggttagtctaaatatagaaaagggagaatttgtgtctgttatgggaccatctggaagtggtaaatctactcttttaaatataatatctacagttgatagacagagtgaaggtgaggttgtattagatggatatgatgtaagtaaattgaaaggagaaaaacttgctgaatttagaaggaaacaacttggttttgtatttcaggattttaatttgattgacactttaactgttggcgaaaatattatgttgccacttacactagagggggcaagtatcaaagatatgaatatacaaactaaaagtatatctaaatttttaggaatagataaaattttagatagaaaaacctatgaaatttcaggaggtcaagctcaaaggtgtgctattgctagagctattataaataaacctaccatacttcttgcagatgagccaactggaaatcttgattcaaaatctactgatgatgttttgaaattatttactaggataaacaaagaacaaaatgtaacaacacttatggtaactcatgaagtatatagtgcaagttattcagatagagtaatttttataaaagatggttgtatatatacagaaataaaaaaatctgaaagcagtaattctttctattctgatatactagctgttttgtctcaaataggaggtgtaagatagtggattttagaaagtttgcttataataatatagttagaaatttcagggcatatttagcatattttttaagttctgttttttctataatgatattttttgtttttgcagtgtctatgttccatccgattataacaaaatctggaatgcagagtggttctactgcatttatggctcttatgacttcagaattaacaatattaggttttagtctactttttatattgtactctttaggaaatttcttgaaatatagattgaaagattttggagtattgatgataattggaatgagcaacagacaactgaaaaaattgatattaattgaaaatttgataataggatttttagcagtgatgttaggaatattacttggtttatcaatttcaaaattgtttttattgtatttaagcaaactgttttatatgaatttaactgaaatttattttccagtaaaagcaatactattgactattgtatcatttatgattttatttttgataacaggaccaatgagcttaaaattattgagaaaaaagagtattttagagcttttagtaggtacaaaaaagcctaaaaaagagataaaatcttcaaggctatttggaataattggtgtaatatgtcttatattaggatatgctatgatactatttggcaataagttaaaaataaatggaggtatgtatacaacagcactattaattactttggggatatttttatttttttctcaatttactattttgatattaaagtatttaaaaaataaagaaaaattttataagaacaaagtaaatatgttacttataagtaatttgatatataaattaaaggataatacacgattgttatttttaataacaatacttttatcggctactttagtagcatttacaacaacttcaacacttgtaagttctcaaggagaagcttctaaaaataatttcccaatggtttactcatatttttcagagcataataatgaaaaagaatatgaagaactacaacaaattagagaagcaatcaaaggatatgattataaggagttaagttttcctgtacttaaatataatagggaagtcttactaagtgtaaagaattataacaaattatcaaaggaattgggattagataaaattagttcaaagttagaaaaatatgaagggattataattcctagtagcaattcacaagaacatataaattctttaaaacaattaaaaaattatagtataaaaaatttaaatatagaagtaaaaaaatcaaaaaataaaataatttttcctacaggactgtttagtaaagttgtagttataagtgatgacttatacgatgaagtaaaaggtgaattttcaaaaattaattttcatggatttgattataaaaactggcaaagcagtgcaaagataactgaaaatttaaaagaaaaacattttaatttggatagagaatataacaggtcatattttttaacattaccagatatgtatttagtagagttacaacaaagtaaaattcttcaatttatgggtgtttttataggagtgatattatttatagcagtttttagttttttatacttcagattatatacagacgagatagaagataatgtaaagtacaaaaaactatcaaaaataggtctatcttttaaaaatatgaataagattgttagtatagagataggtacattgttttttataccgtattttatagcaattataaatagcataatttctttactgtttttaaatcaagtattaaataatagttttaggttagaaaatttgggtatattactactgatatcatctatatattcactttatttttacttattaaaaaaaatttatactagaaaagtttggttttttgattaaagtggtatataatagatatataaattaatatttaaaaagtagttaatattaggggagggcatttgcacctcccttgtaatatgtggaaaattgaatattagaagaaggaggagacttgatggaaaatcaacaattattaggaacagaacgaattagtaaattactactaaaatattctataccagctataataggtatgttggtaaatagtttatataatgtagtagatagaatttttattggaaatataccaggggttggaccacttgcaataacaggtcttggtgtaacaatgccaataatgacaataatacttgcatttgggatgttgataggtataggaactactactaccatatcaataaaacttgggcaaggtaaagtagaagaggcaagaaaacttataggaaatgcaatgacgttatctgtaataacaggaattatcataatgatacttggaatattatttgcaaataaaatacttacattgtttggagcaagtgaaaatactttaatatatgcaaaatcatatataaatattatattattaggtacagtagtaaatcttctttccttttctttaaaccactcaataagagctgatggtagtcctaaaatttcagcaggaataatgatagtaggatgtttaactaatatagttttagactggatattaatatttggattcaatttgggaatacaaggagctgcaattgctacagtaacttctcaggctcttacagctattttaactatagggtattatataagtggaaaatcaaacttacgattcagtaaatctaatctaaaattagataaaaagctaataaaagcagtgtttgcaataggtatgtcgccatttgcgatgcaacttgcagcaagtttagttcaagtaatatcaaatattgcacttaaaactcatggtggagatttagctataggggctatggctactatttcttccattgcaatggtatttttgatgcctatctttggaataaatcaaggagcgcaacctattataggtttcaattatggagctgaaaaatatgatagggttaaaaaagcatatttaggttcattagtagtagctactataattttatgtatgggtatggtagtagttatgcttttcccagaagctattataggtatatttaataaagaccctgaacttatgaatatatctgttaatggattaagaatatacttacttatgttgccaattgtaggcttatcagttacaggaacaaactttatacaatctataggaaaagcaaaaatggctatgttattgagccttttaagacaagtaattttattgataccagcagtattaattcttcctacattcttaggtttacagggtgtatggacagctcaaccagtgtctgattttatagctacagtaattacaggtatagttgtatttagagaattaaaaagatatactcctaaaactgaaaaattaaatgaaaatgaaagactaaatgagataactactgagtaaaaatataaattcagataattgagcaagaaattgcaaaaaatacgattatatgataaaataaaaccgctgtcaaggataagagaaattctaattatggagtgattttatggaatttacaaagaaaagcaaattaaaaaatatgtatgtaaacatgaatgtagctagaatgttgtctaagataaatgagtataagggtaggcaactgctttacaaaaaacaaccaaaagaaattttagaaaacctagaaaaaaaatctttagtagattgttctgaatctacatacattggaaatcaaagagatagtagtaattttaatctagaaaagttgataagtaatgaagttacacctagaagtagagaggaattgagtattgttgaatacagagatgtggtaaaaactattaacagtgcttatgagagtattcccatcagttcacaaacgattcttgagcttcatgggtacttatataaattttcatctactagaggaggaagttataagtcagataatgattttattgaacacaatttaaaacctagcgaatttataagtattgattcaagtgtcaataaagttgaaaaagctgtagaagaaatatgtgaagcttataatacattgatagaggaagatgaaattgatatattaatattaatttctgcatttgtgttagatttcatattgatacatccattcaaagaaggtaatataaaaatggcgagagtacttatcctattgttactaaataaaaatgggtatgaagttggaagatatataagtttaggaaagatatttgatgatagttcatatgaatattatagtaatttaaattatttgaaagcctcaataggtagtgaaaaagcagatatgaatgcatggattgagtattttttagagacgatattaactgcatatgagaagctggatgatagtttaaatatatctgataagaaaagacaaacaaaaactagtagaatagaaaaaataataaattctacccttggatattttacaaaagaagatataagagatttatgtcctgacattccagaacctactataaatagagtttttaataatctaagaaaacaagataagatagaagttgttgcaagaggaagaagtgcaaaatggaagaaaaaatattaaaaaatgtttaaataactaaaatggtatagtgttttacactataccatttttaatgtcattagcatgagcaataatttaacaacttaagcaatatcaattttatttattgattatttttgaactgaaaaatggggttatatggtatactacaataataattaattttggatgagaatatataacgttacagaatatcttaggagtatatgtataaaaaatataataaaagtgtgaggtttagtaattaacaaattatgtggcttcacacttttttataaaataaaaatacttagcagaagaatattttagttgatatgtttataagatagtacttgtttgggtaaaagtataaatagtaaaaaagtagaagtaatgtgtataaaaacataagttacattctgtaataatagttattttataattcaacaaaagaatagaatgggtatatttgtgaaataataatataaaataatcttaggagtgatcttatgaagaaaaaattattatatataaatgtaaattcaaaacctgaagacttatcttcaagtaaaactgtagcaagaaaatttataaataaatttatggaaaaaaacaaagattttgaggttgaagagatagacctttataaagaacatataccgagacttgagtatcagtactttgaaaaaagaaatagcatagttagtgaagaaaatgctaaaaatttagacgataaggatagaaaagagcttacaaagattagaaatctttgtgaccaatttgtgagtgcaagtgtttatgtaatagcagcacctatgtggagtttatcttttccagcaccacttaaagagtatatagattgtataattcaagatggaaaaactatatcttttgaaggcaatgataaaccacaaggaattttaaatgatattgatagaagtatggtatatatacaatcttctggtggacacataccatgggtcttgaagccagttatgaataaagggttaaattatgtggaaagtattatgaaatttataggaattaaaaaatttgatgaattgttagtagatggaactggaactagtgaagaagaaagacaagctgcaatagaaaaagcatctgaaaaaatacatggtataatagatggtatgaaattttaattataatattttattaaaaatataaaggaaaaacctcttttaatgtagaaacttatattgaaggaggcgagaatcatgcgagaagaaaaaagtaatgaaaagtatgattgttattggtgtaatcaagaaaataatttctgtgtagaaataaaagataatatagtaatgatagatgatggcactggtacgttaaaacaagccgttttcatagggtataaacaaatccaaattaatttaaattgttcacattgtcaaaacttaaatagaataaaattaaatttgtagaattttaaaatggaaattattgaaggaattaaaaatagaaagtgttaatatttagactgaaaattatattttatacaataaaagtttatttaaataacattgtattttaatatttattttcagtcttactttattaaaattattttttggttatgtctggaaaatatctgtctactaatttttctgaaatattttttaattggtcagccattgaagtcagacttaataaggctatcaataaatcatctttattttctggatttatactaatattttcaaaattagactctataaagtccggtatattctttctttgattttcttttattaacatgaatttttcgtaacatgaaactaaatctttttcactgaaattatccttttcatacacaccatgtaagattcttttaatttcttgtattgtaagtgtatttttcatagaataaataattatcatctgtaaaatttgttctttagtatacttttttcccttaactggtttgattaatccctctttgctgtaattatttatcatggttttagtaagaattttatcactttcaaatcttttattaggagaaagtttattgtcaattagagaaataatttgatccatatataagtcaatagagggaatatcgtttgaagttatatctgcattatttagtgtttctagtattatagtattaagttcattattcatcatatgttacctccataatatatataatacactaaattagaaagtaaaacaatattaagacttgtaaaaaaaacataaagtggtataattaaatatataatatagtaatgaaaactatatttatgaatctgatttttaaaatacataattgtaggaggacgaaatgtatcaattttttttaaagggtagagacccaataagcagtttaactcattttataggtgcttgtttatctcttttagcaactataattttagtttttcaatctgttacattacaggaaacttctctcttgatgatagtatctgtatcggtatttggactttcactaattgctttatatagtgcaagttcgtattatcattttttaaaggggacaccagaacaagaattgttttttagaaaagtagaccatgcaatgatttatgtattgattgctggctcttatacaccaatatgtctgaattttatggaaaaaaaagaaggcataatatttgttacagcaatatggatagttgcatttattggcataataataaaaatattttggatggatgcacctagatggttatctaccagtatatatttacttatggggtgggcaattgtttttgatataaatgcattcaattcaattcctaaggattgccttagactattaattatggaaggtgtatcttactctataggtgcaattatttatataattaaaaagcctaatataagtcctgagtttggatttcatgaaatatttcatatttttattatgataggttctttatttcactttttagcagttttattgtatgttttatagttttaaaagatttgattaattgatactaaaattctacaatgaataaaatggaactgccttatatagattatatcttcgacaataagacagttccttattataaatattaaattctacttataataaaattttgataaaaatagtccattcaaaatgcctattccataattcctttaatgtacttttcatttacgacatatagtttgaatttatgtactataattatatcctctaaattctctgaaacactaacaattctgacacatttgtttctaatttctacaggtaaatctaaatcatttgttaaattcacatagtcatcatatttatacataaaatcatccctttacattaagatatacttattatactatattttaataagtttttttaaattattacaatttttcccgaaatttcattttttatacataaaatttccaaattaggtaaagattaaattttttattgtataaacaaaatttacatataaaatattttattcaaatttttaaataactattgccaatttttgaaaaatatattattattaatagtaataaaaaactgtaaatttagaatattaataaaaattatttgggaggaaattatcatggtgagattaaatatagtaaaattaaatacaaaattaaatcatcaccatcatcatagattaaagggattgtaatatgaaattaattcatagacacaagccctgtttttagtgtaattggtcttgtatctatgatgggaagtaattttaggagaaaattatagccatataggtataaagcctatatggcttttttattgttttaaatttgcaaatataagagtaaatttaatgaagagggtgagaatgtgaaatttttgaggattgaagatgaagttatttattctaaaaaaagatataaattaaaaagggaaatagataaactttttttggatgaagaatattttcaaatagaaccacaattatttgaagaatatgatgaatttacaactataaataataaaattccagaagaatctatggtaaaggttgtaaatggaaaagtaatggtacttagagctgatataactacaagtataataaaaagccttgtaccaagatgggaagatggtttaaagcttaagcttttttataattcatcaatatataaaaataaaaatacagttggaataaaagagataagacaaataggttgcgagtatctaggagaagcctctgtagaagcagatagagaagtagtgaaattagctcttaagatacttgaaaaatacaataataattttattttagaggttgggagtagcaagtatattcatggtttgttagaagaattaaatttaaataagaattgtgaaaatcaaattaaaaatttactatatacgaagaacactcatgaattaaaagtatatattgaagaactgaaaattaagcgtgaagtaaaagagctattatcaaatattttaagcttgcaagggaatttatacaacgttattgaaaaatcaaacaagttctattgtaataataagatgaagcaagctcttgaagaattaaagcaagtaaataatttaattgaggaatgtaattttttagataaggctagatttgatttatcaatgattactatgcttgactattatgaaggaattatgtttagaggatactacccaaactcatataaagaaattcttagtggtggaagatatgattctttaactaaagagtatggaaaagaaattccagccattggatttacactaagtgttgatgagttaatgaagtatgtatataagtaaagtttagaaggagggattgctttggattatttgactatagcactagcaaaaggacgaattgaaggggaatcatttaaaaaatttaaaaaaatgggtctaggagatagtatagacacagatacgagaaaactaatttttaaagatgaagaaaataaaattatatatatacatgtaaagccatcagatgtagttacatatgttgaaaaaggagtcgctgaccttggtatagcaggtaaagatactattttagagaatgagacagatgtatatgaaatatatgatttaggttttggaaaatgtaaatttgctgtagcaggattaaagggagatagcatatatagagaagatgaatatctaaaagtggcaacaaagtatcccaatatagcaaaaaagtattttaaagagaaaggtcaaaaaattgaaataataaaattaaatggttctgtagaactagctccaatagtagggttgtcagatgtaattgtagatatagttgagactggcaatacacttaaagcaaatggtcttgaaatattagaagacatatgtaatataagtgctagaattatatcaaatagagctagctatagatttaaatatgaacaaattcagaatataattcgtttatttgaagaacttgataattaaaatataattgaactttataaggagggatttaagttgagagaaaaagaaagtataagagagttaaggggatatgaaccaaatcacgtaaactgtaaagtaaaacttgatgcaaatgaaggaagtaagaggttgtttaaataccttattaaagaaatttcagatagtgatatagatttaaatttatatcctgaagattcttatagtgatttgaaagaatctataatagattacataaatatttctggagtaaataagaaaaatcttctagtaggaaacggttcaagtgaaataattgatttaataatacatacttttgtagataaagatgaagtaatattgagtttctctccaagttttagtatgtattctatatatagtcagataaatgggtctaaatttataggtgttgaaagtgatgaaaatttagttataaatatagataatgtgattgaaaaagtaaaggagaataatcctaaaatagtaattgtatgtaatcctaataatccaactggaacaatattaaagagggaagagataataaagcttttagattcaactaatagtctagtggttttagatgaagcatatatggattttggagaagaaagcatgttaagtgatgtttttaagtatgataatctaatagttcttagaactttatcaaaggcatttggattggctggaataagaacaggatatatgttatctaatagtagtttaataaattctgttgagaaagtaagacctccatataatttaaattcattatcagactttattgctacaagagcacttagaaataaagatgtggtaaaggcttatataaaggaagtaaaagaggaaagagaagttttatatgaagaaatgattggtatgggaattaaagcatacaaatcacaagcaaattttatattattttattctgaaatcgaaaatttatcacaaaaacttattgatagaggagttttaataagaaaatttggtggaaagttagaaaattattacagagttacaattggtgataaagaagaaaattctatgtttgttggagctataagagatattttgaaaaaggagaaataggtatgagaatttggaaggtagaaagaaatacttttgaaacacagattttagtagaattaaatattgatggttctggtaaagctgaaatagatactggaataggatttttagaccatatgcttaccttaatgtcatttcatggcaagttcgatttaaaagtgatttgtaagggtgatacatatgtagatgaccaccatagtgtagaagatataggtatagctataggtgaagcatttaaaaatgcactaggtgacaaaaaaggaatacgaagatattctaatatctatatacctatggatgaatctctatcaatggtagcaatagatataagtaatagaccttatcttgtatttaatgctaaatttgatacccaaatgattggtagtatgagtactcaatgctttaaagaattttttagagcttttgtaaatgaatcgagagtaacattacatatcaatctcttatatggggaaaatgaccatcataagatagaaagtatttttaaagcatttgcaagagctttaaaagagggtagtgaaatagtttctaatgagatagcatcttcaaagggggttttgtagaatgaatataatagtagactatggtcttggaaatatagattctgtgtctaggggttttagaaaagctggaatagaaactaaaatttctagtgatatagatgaaataaaacaggcagattcacttatacttccaggtgttggagcttttagagattctataagtgccttagataaactaggattgataccaataataaaggagcatgtttctaagggtaaatttatgataggtatatgtctaggaatgcaattactttatgaaaaaagttatgagtatggagaatatgaaggattaggacttataaaaggaagtattgataaactggatataactttaaaagtgccacatatgggatggaataatctaaaatttaataaggcaaatgatgatatacttaaatatataaacgaagatgattatgtatacttcgttcactcatattatgcaaattcatcaaatgaagaactagttgcattttcagaatatgaaaagaaaatccctgctattgttagaaaaggcaatgtatatggtatacaatttcatcctgaaaaaagtggagaagtagggttaaatatattaagagcatatggggagatgataaaatgataatatttccagcaatagatataaaagataataagtgtgtaagactcacacaaggagaatttgacaaagtaaatgtatattatgataatccattagaagtagcatataaatggaaaaatgaaggagcagaatatatacatatagtagatttaaatggtgctagaagtgaatttggtataaatacaaaaataattgaggatatagcaaacaatatagatatacctattcaagttggtggtggagttagagataagggaaaagtcaaaagtttaataaatgctggtgttactagagtaatattaggtagtatagcgattgaaaatttgaatttggttgaagaattggtcaatgaatataaagagaaaattgtagtttctatagacgctaaagatggaaaagtagcagttaggggatgggaagttgtaagcgatgtagactcattaacattatgtaaacaacttgaaaagataggtgtacaaactattgtttatacagatatatcaaaagatgggatgttgcaagggccaaattttgacatatatgaaagaatagcaaaggaaacgtcattaaatgttattgcttctggaggcgtaacttctatagaagacgtaaaaagactaaaagctatgaacttatatggtgcaataataggtaaagcgctttatgataaaaagatagactttaaggaggcacaacaattatgcttactaggagaataataccttgtctagatgtgagaaatggaagagttgtaaagggaaaaaaatttaaagatatagtagatgttgatagtccagaagtacttggaaaattttatagtgattgtggtgcagatgaacttgtattctatgatataactgcatcaaatgaagagagaaagacatctttagaatttgtgacaaaagttgcagaaaatataaatataccattttgtgttggtggaggagtaaataaattagaagatttcactgatattttaagaaaaggtgctgataaggtttctataaattcatcagcagtcaaaaatcctgaattaataagggaagcttcattaaaatttggagcacaatgtgttgttttatcgatagatgcaaagaaaaatgaagagggttcatggagcgtatacgtaaaaggtggaagagaaaaaactaatctggatgcaattgaatgggctgttaaaggtgtagaacttggagcaggagaaattgttgtaaatagtatggacgaagatggaatgaaaaatggatatgatatagaattattatcaaagataacttctttagtaaatgtacctgtcatagcatctggaggcgctggaaaaaaggaagatttttatgaggcagttaataaatctaatgtagatggaattttagcagcatctgtttttcattttggcgagataaaaataaacgatttaaagaaatatttaaaaaacatgggtgtagaagtaagattataagttaaatactaaaaggagattagaaatatggataataagtgtaacaatgtatacagtgatgaagtagaggaatttataagaagtataaagtttgatgataaagggttagtccctgttgttgttcaagaggtagttagtaaagatgtactgatgttagcatatatgaataaagatgctataaagaaaaccttaaaagataaagtagcttgctattttagtagaagtagacaaaaactttgggttaaaggtgagacatctggtaatactcaaaaagtagttaagatgtcttatgattgtgatgtagatactatactactttttgttgaacaaactggtgtagcttgtcatacaggcaattattcttgtttttacagagacttgtttgatgatagttcaaaaatggagcctgaagtacaaacaaatatattgaaagaattatatgatttaatcaatgaaagaaaaaataatccagttgaaggttcttatactaattatctttttgaaaaaggaatagataagattcttaaaaaagtaggtgaagagagtagtgaggtaattatagcatcaaaaaataccgataaaagtgaacttatttacgaaattagcgatttagtgtatcatacattggttttaatgatagaaaaaggtgttgaaattgatgaaataaaaaaagaattacttaaaagaagaaaatagaataggatagattaatggtaataagaaaatataccgcttttaataaaaagtggtatattttttattttatattttcgatttatagaataatatttaaattacttgataaaattaactatatatataatttattgataaaataattgtagtacattatttattttagaaaaaagataattatctaattatatttaaggataataatatgaaaataatttttatattaaaaaatatgaatgaaaatagtaggttttataaaaaacatatttagattttaacatctaaaaggaattttcaaacctaatatttcatttttaaataaaaaaataaaatattagttttgatttatggtttaaattgggttataataaattgtcaaattatttattaatataaaatagactataaaacaagcaaaaatcatactattatataaaagaccttaaagatagaaaattacagaaagaagccaaaatgtttttgaaaaaaatgaaattttattgcaaaaaaatcaaaatcaatttaacttaatagttataatctatttttagtgttacaaatatacaatgtatattatacaatataaaaaatacgtttatttataaatattattatatttggatttttggtttttataatttttttatatttaaacataactaaaagtaaaagattacgaaagctaagtagagtttattttattttaataaataaaaaagctatttttctatatattggcataatatatgcttatttaactatgaaattaaaattaaataggattaatgaggaggaaaagaatgggaagtaatgaactgaaaaagactcttggcgtatcagcagcattatcaactgttgttggttctgttataggagcgggcgtattttttaaaccacaagcagtctatacattaactggaggagctccaggtcttggtatattggcatggttaatagctggaatcataactataacagctggtcttacagctgcagaagtatcagttgcgataccaaaaactggtggaatgatggtatatataaaagaaatttatggagacaaattaggttttttaactggatggatgcaaattgtattattttatccagggatgatggcagcattaggtgttatatttggagaacaagcatcagcactaattggtagcccatcacttttacttccaatagcaattggaattatagtaatagttgcagggcttaatatgttaggttcaaaaactggaggagtcatacaaactgtctctacaatttgtaagttaataccacttattttaataatggttgttggatttattaaaggtggtggaaataatccaatacttacacctatggttggtgaaggattaagcctgggtagtgtactaggtcaagttttaattgctatattatttgcttttgatggatggatgaatgttggtactttagctggagaaatgaagaatcctggaaaagaccttccaaaagctataataggtggattgtcagttgttatggctgtttattttataataaatttagcgtatctttgggtattaccagctaatgaattagcaaattatgcttctcctgcatcagcagttgctgaagttatatttggttcaatgggtggaaaaataatatctgtaggtatattaatttcagtgtttggagcattaaatggatttttactaactggttcaagggtggcatatactttagctacagataagactttaccaaagtatggtatattttctaaattaaattctgctcaagttccagcaaatgcaatagcattagtatctgttattgcatctatatatgctttgtcaggtcaatttaatttattaactgacttagctgtatttgctacttggatattctatgtattaacttttataggggttatgaaacttagaaagactcatccaaatataccaagagagtataaagttccattatatcctattgttcctataatagctatagcaagtggtatatttgttgtagttaatcaattgtgttttgcagggatgaaaactactatgatatctataggaggtcttgtaataacagctataggcttaccagtgtatgcttatatgactagaggaataaaaagataaaccaagtagtttacaaatgctttataattaaaataaaagagactgtctcaaaatagagataagtctcttttttattgttaaaagggtaaagagatgttttattttataaaaaaagagtgttctatgaactaaaaagtttattttaaggtattcactttatttttagtttttgaattataaaattaaacatctaaaaaattatttgctttaagatactttattttaaagtgtttttttttcaaactaagtgatatctatataacaaatattatacataggttttatgaaaattaaatctttctgttatataaaatagaatattgtattatatagaaaatattacctgatcaatatcgtgatttataaataagattagaaaattttatttgataacaaaaattagacaatatgaatatataatgtatgtattaaaaatgtggcaaatagttgttttggtatttattatttgtttaatatttctaatttataaaaaaaaaattataaattttaaaaattataaatgacattttaactagaattaattgtaaaaaacactatataatactcaattttcaacattctatacaattatacagaaattatacagcataataatcaccgaaataacaaattttaaaaattaagcaaaactttttgtcgaagttcaacgtctatatatatgtagtgtaaatttttgggataaaatactacaaaaatataaatgtaaaaatatagtaatattggaggtcgaacgatgagaaataaaaagaaaaaaataaatagaaagaagttgtatttgcttttaagtgctattgtagtgtgtctggcttttatagtagttggtgttcgcgtcagctctttaaatatgaaggaaaatgaaattagtagaaatgcaaaactgtcaagttctactattacagatatagtatctaatacatcaatagaagttagtaaagggccaagtaaaagttctggaaaaatagcatacataactatagatgatggcccatctaaatttactgacgagatgataaaaactttaaataaatacaatgttaaagcaactttttttatgatagatgggaatatgaaggaatatccacagcaagttaaaaatataattaaaaatgggaacacagcaggttttcatagtgtatcacatgatattcacaagctttatgttactagtacatcagcaaaagaggaatttgatacaaatgatcaaactttttataagataactggtaaacattcaaaagtaataagaataccttatggaagcaaaccatatacaccacaagcctcttatcaggctttagttgatgctggatataaaatttgggactgggacttagatacagaagattggagatctaattcttctcaaattgtacaaaatgtaaaaaatcatattaagaatagaaaaggtgaagataaagaccaacttgtagttttaatgcatgagaaaaaacagagtgcagaagctttagattcagttttaaaattcttatcagatgaaggttatgaatttgcgccagtagatcaaaaccaaataccaaaaaattattggttacgtaatttagagtagttaaaatataagaatattgattgatatttttagaaattgagaataaaaatgagtgaggtgtaggtatattgaataaaaaactttatataggaatggtcggaatattgtctttgatgatggttggttgtaataaaagtttagcaaaagtaaatgatgtggaaatcacaaaagaacagtacaaaaaaacaaaagcagttttatctgctactaataattatataaatgggcagtctttagatgaattagaaaaaactttggataaaaaaggtagaaataaattagaaaatgttataatatcgtttatggtggataatgaacttttatatcaagaggctaaggataaaggactaactccaagtaaaagtgaagtagactcaaaatatcaagaactagaagataagatgaatttgaatacaagctataaggaaaaaatggacaaagcaggtgttgataaagaatatttaaaacaagaaatatctagagatttagcaatagataaaaataaaaaggcctttgaagatagaataaacataagtgataatgatatggaagcctactatacaagtcataaaaaagattttaatgtagaagaagtaagtgcttctcagatacttatatcgactttagataaaaataaaaaagaagtaagcaaagataaaaaagaagctttgaagaagaaggcagataatatattgactaaaatcaaaaatggagaaagttttgaaagtttagctaaaaaatattcggatgataaagcaactggaaaaaatggaggacagctaggatattttacaaaggatgataaaaatgctgagtttacaaaggaagtgttcaaattaaagaaaaatgaagtttcaaatgtgtttgaaactagttatggatatcatatagtcaaagttactgataaaagagaaagacaaaaaagttttaatgagtgtcagagtttaataagagaatctattttaaatgaaaagtatattgagcatataaaaaaactgaatgaagatgctaaaatagacagatagaatttctaacagctcaatcctagcctgtaatcggagggagattttacaggaatgtttaagagtttaaagagaacgaaagttgagaaatacattatcgataataaagactctttttatagaatagcatatagttatacgaagaatgaagaagatgccttagatgtggttcaagaagccatgtataaggcactatactcagtggaaaatattaaagaagtaaattatataaagacatggttttataaaattttagttagaacgagtatagattttattagaaaaaaccgtaaatataataatatgacagatattgaccttatagatgagactggagagtatgataaatatactgatttggatttaagaagagctttggaagaattacctattgaatacaaatctattataatattaagattttttgaagatttaaagattgaagaagtagcaataatattggatgaaaatgtgaatactgttaaaactaggttatatactgctttaaaaaaactaaaattaaaaattgaagagtagggataaaaagaatgacaagcaaagaaaggttaaataagttaaaagatgagtatcataaaattccaatacccaagaaattagatactataataaatcatgaaaaaatagaaaacatatatcgagagaaaaataaaaaagtaaatagattaagatttaaagttgcaatagcctttgcatgtatatttacagtattagtaaatataagtcctgtatttgcagacaatttttctaagatacctgtaattggagtaatagtagaagtaataactataaaaaattatagtttaaaaagtgaaaattatgaagctgagattgatattcctaaaatacgaggtttaaaagataaaaacttagaacaaagattaaacagtagttttatggaagatggaaaaaggctttatcatcaattccaagagagaatggagaagatacaatcatcaaagaataaaggatataaatctttaagtttgagttatagtgtaaaaaataattctaaaaaatttctatcaatagagatgacaaaaaatgagatagaggcttcatcatatgtgagtaaggcacattatactattgataaaaaaagacaaatagttttgactttgccaatgctttttaaagatgataagtatataaaagttataagtgataatataaaagaacaaatgagagaacaaatgaaaaaggatagtacaaaatcctattttatagatcaaaaaaaagacttgcctgttgaagattttaaaacaattaataagtatcaggatttttattttaataaaaatgaagaccttgtaatttgttttgatgaatatgaagtagcacctggttatatgggtgcagttgagtttgtaataccatataaagtaataaaagatttgtaaattgaatagtagtttatatatacatattttaagaaggacaatatgactacatataaaaagcttaaaaaatctatatttaaaatttctatattttcaatatgcttattagtctcattagtagatataaaccctatatttgcaggtagttcctctaatgagacttcaaatagtgatacgataaaggtgttaaatgctaagagtctcaactttaaacaaggcaattatgaagtgaatgtgagtattcctaaaataaaaggtttaaaagataaaactttagagaataaattaaacaatgagtttttgcaagatgggaaaaaaatttacagtgaatttcaaaataaaatgaaaaaggaaaataataagggtcatagatacctaaatgtaatccataatgtcaaaaataattctaaggactttttatcaatagaaatgacaaaagaagagatagaagattcctcgtctataactaagaagcattacactgttgataaaaatagaggaatactattaaatttaccaatattttttaaagatagtagatatattagagctataagtgataatataaaagagcagatgagaaatcaaattaagaaagatgatacaaaatcttattttatagaccaagataaagacttcccagtgaaagattttgaatctataaataagtatcaagatttttattttaataaaaatggaaatcttgtgattagttttgaagaatatgaagtagtacctggttatatgggagcagtagaatttgtgataccaaataaagtaataaaaagactaagatagatatatagaagatttttagatagactggtaaggagaattatatgaatatatatgaacaagcaataagattaatagaaaataatgaagatttcgcatttgctacaataacgtctcattcaggttcaacaccacgtgaaactggagcaatgatgattgtgaaaaatgattctactatatttggttcagtaggaggaggtagtgtagaagcagaatgtataaaacatgcaattaatgttataaaaaatagagaatcaatgttgtataaatttactctaaacaaatctgatgtggcaaaactaggaatgatatgtggaggtactggagaaatacaaatagattttatagatagtaaattaaaaagtaatatagaaaaattcaataagagactaaaggaaaatacaagtaaagcatatatatttggtgcaggtcatatttcaagagatgttgctgtgatactatctcttttagaatttagaacagtagtaatagatgatagagaagaatttgctaattatgaaaggttcccagaatcagaagtagtagttttagattcttttgaaaatataccagattttccaactgacgaaaatagctatataattattttaacaagaggtcatctatatgattcaagtgctttagaatgggctcttaaaagagaaactggttatataggtatgattggaagtagaacaaaaattggattgacgtacgaaaaactcatgaaaaaaggttttaagaaggaagaattatcaaaagtacatgcaccaataggcataaaattgaatgctcaaacaccagctgaaatagctgtatgtatagctgctgaacttataaattgtagagctaataaggaaaaataaactaatgaacacagggagtaaagatattgatactttaaatgttaattttagagggattgaaataaaagcagttttagtatataaaaatagaaaaaatatttctataaaaatagatccatttggcaaaataattgtaatgagtcctcctaaaatatccaaaaaaataataaaagatataattattgaaaaaggagactggatacttaaaaagtcagaaaaatataaaggaagagaagaagtatacaaacaaagaatgtttataactggcgaaaaatttctttatttaggtgaagagtaccatctagttataaaagaactgttgaaagattctgtcaaaaaaagtaactgtagaataactattaacgaatatcaaatagttgttcagacaaatgatacaagtacagattttattaaaaaatctttaaaatcttggtataagatggaaagtgaaagaacagtattagagagaatagattttcttaaattaaattgtgaaataatgaagcaattagttccagcaagtgttaaggtaaaagaacaaaataagagatggggaagttgtacagctcaaaaaaatatttatataaactcaaaaatatctatggcaagattagatgtaattgattatgtaataatacatgagtttagccatttagtacatatgaatcactctaaaaaattctatgatttagtaaaatccattatgcccgattataaagataaagaaaattggctaaaaataaatggatataaaataataatctgaaaacgattattccaaaatacaggcgtaaagtataaaagaagtattattgtgaaaaaaataaataatctgaaaattttaaaaaaagtcattgacattgtaaatgatagggaatataatctatattaacaacaaaacagaattaaaatataaaattaaaaaattaaaagcaatgacagagacaacaatactaatagtgttatccacagagaaccaatgttgctgagaattggtgttaacagtagtataatgatcactctggagcttttgtactgaatatttttagtaagtacaaacgtatgtcaacgttacatgactaaggttaaggtaattaattacccgacctgaaaaaagaggggtagatgtattttttatatctacaaataaggtggtaccgcggaatataactttcgtccttataagtaatatttatattgcttataaagatgaaagtttttttattttaagcgatataaataaatttaatccatataaaattaataaaaaaataataaaaataaggagggatttttatggaaaatactgtatatgctaaattaaaccaaggaatagattcttttttaagagtggctatgactctaagaagaagagaggttgatatacaatcaataagtatgactgtagataatatgaataattcaggtataaaattaatagtaaatgaagaaaagacatctttagattctgtcttaaaccatatgaaaaaactacatgatataagagagataactgttgaaagaatgagacattaattaaatatattttataaagctaaagataaatattaaataagaaaaatcttagattaaaatataagtgtcattgaatttatcagtttatcacagttaataaatttattagtttgttgtagctaataaaaactgaaaattctaaaattataattgtaagattatataaatttagaatttaaatctgttgaataatattaaaacaatgataatgagtatgaatttctaataaaaataaatatcataaaaataagaaaaagtattgggaggaaatgaaaatggcaagaatgtattatgaaaaagatgtggatttagaggttttaaaaaataaaaaggttgcagttttaggttatggaagtcaaggacatgcacatgcacaaaatcttagagataacggtgtacatgtagtgataggtctttatgacggaagtaaatcagcacaaaaagcaaaagaagatggatttgaagttaagagtgtagcagaagctacaaaagaaagtgatttgacaatgatgttaatgcctgatgaaaaacaaaagaaagtttatgaagagagtgtaaaggataacttaaaagaaggtcagacattagcttttgctcatggattcaatatacattataatcaagtacaaccaccagaatttgttgatgttgtaatggtagctcctaaaggacctggtcacttagttagaaatgtatttacaaagggaagtggagttcctgcactatttgcagtatatcaagactacactaaaaaagctacagagacagttttagcatatgcaaaagggataggagcaacaagagcaggtgttttagaaactacttttaaagaagaaacagaaacagatttatttggagaacaatcagtactttgtggtggaataagtgaacttataaaattgggatataaaacgcttgtagatgcaggttatcaaaaagaagtagcatactttgaatgtttacatgaaatgaaactaatagtcgaccttatatatgaaggtggatttgaaagaatgagatatagtataagtgacacagcagaatatggagattatgtatctggtaaaagggtaataactgatgctgcaaaacaaggtatgcaaaatgttttagaggatatacaaaatggaaaatttgcaaaagcgtggattaaagaaaatgaagaaggacgtgaaaacttcctaaaaactagagaagaagaatataatacagaaattgccgaagttggtagaaatctaagaagtatgatgtcattcttaaaataaatatatattaaatggattagtttgagggaaagagtggtgtatagtagtgcgtatgaatggagcaaaggtaattttagaatgtttaaagaaagagggaattgacacaatatttggatatcctggtggagccgtgatacctctttatgatgctctatacgattattcagatgattttaaacatataaggacatcccatgaacaaggtttagttcatgctgcagatgggtacgcaagaagtactaatacagtaggagtttgttttacaacatctggtccaggagcaacaaatgccataactggaatagcaacagcttttatggattcttcacctatggttgtaatttcagggcaggtgccaactagtttattaggaaaagattcttttcaagaaattgacataactggagcaacattatctatgacaaaacataattatttagttagaaacactaaagaattagttcctacaataaaagaagcttttagagttgcaaattcaggtagaaaaggacctgtacttgtagatgttccaaaagatttatttttagcagaaatggattttagtggtgaggactatgatttatgtcaaatagatgattatatggattataagagtgattttgatctagatgatgaaactaatattaagcttttaaatgaagcaatagatatcataaaagaatctaaaaagcctgtaatatatgcaggtggaggtgttaaatcttcagacagtgaggaaattcttgaaaaatttgcaactaagatagatacacccgtactaaatacacttatggggcttggaaatatagatagaaagaatgaactatctcttggaatggttggaatgcatggaagtagagaaagtaatttagcactttctaattcagatttagtaatagcgataggtgcgagatttagtgatagagtgataagtaaaagttctgaatttgctaaaaatgcaaaaataatacacatagacatagacccatctgaaataagtaaaaatatagaatctaatgtatctttggttggagatgtaaagctagtccttagtttattaattgaaagggttgaaagtaagaataatagcaattggaaagaagagataaagacatttagaaagagtgagggtgtacaaacatatgaatttcatccacaaaatatacttaaaaaaataaatgaaaaatatgaaacattaaagaaacccactgtggtagtaactgatgtcggtcaacatcaaatgtggtctgctaaatactggaattttaaaggtaataaaagttttataacatcagcagggttaggaactatgggatttggtttaggtgcagctattggaactaaagctggtaatgtagataaaaatgtggttttagtaactggtgatggaagttttagaatgaactgtaatgaactagctacagttgcaaattataatgtacctatgcttattttactactcaataatagaacattaggaatggtaagacaatggcagaagttattttccaatcaaagatactctcaaactgatattaatgaaaatgtggattatgttaaactcgtaaatgcatataatattgatggatataaggtatccaatatggaagaattaggaaaggttctagatgtgatagattttaataaacctgtatttttacaatgtgatatagataaggattatgatgtttatcctattgtagcacctaatgatgcattggaaaatttgatatgtaactaaaacttatactgaatattgataaaattttttattaaatttttattggtattcagtttttgtttagagatagattggcattttttatttttgcaaataaatcaatgaatatataattaagaacttattaaattttaattatacaatttagaatagtattacaacttaagtaaatattaagttttattcgttagatttattattaataccttatattagttatggttgttatatactctaaagccttgaaattacaagcgtatagctgactatataaatttgataattttagcttttaaaatagataaattagattttgccacccatttgccaccgtattatatttttgggtggcaaactctaatttgtaattttttcaaatatatctacagtttcatttttcattttatcagttacatgtgaataggtatccattgtagttgataattggctatgacccaaacggttttgtatgtctttaatgttagcaccattttctaataatagagtagcatgtgcatgtcttaaagaatgaaaatggaagtcattgtttaaagctactcgaatttgtcttactatagtgtctaaagtgtgagtattcacttgttgaccattttctttggtacatacccaatcactatcaaagtaaaattctccgtattttaatttcattttcttttgatataatttatgttcttttaatgcctttattaaagtgtcacctgtaaatatagttctgcaagagctttctgtttttggttgccctaattcaaacattccatttggttttttaatcaaagtatgctttactgtgatagttttattatcaaggtctatattatcccattttagtgcaataatttcacctcttcgcataccagtatgaaatccaattagtaaaactatacgttgaaatgaatcttgaggaaatatatttagtatttgattaaattcttctaatgtaatagttttaactttattagtttctgttttagatttagtttttggtatgcttacatattgcatagggttttctcgtatgtgtttgtaaggatggactgctgattttaatgacctatgtaatatggcttttaatacttgtaatgtattttgagaataatcctctttgtactttttatttatgaagttttgtagtattgcaggagttaaagcttttactttgtaagctcctagttttggctttatatgtttttctatgtttattcggtagctttcttgagtgttgtatttacagttgagtaaaacatattctttgtaccaaaagtctaggtagtctgataagctgatgttactttcttcaaagactatgccagagttttcatattcatttagtgcttctcttagtgctttttctgcttctttttttgtattgccaccaactctttctactttttttctttttccttctactatgcctaggtcaaagtagtaataccatttgttgcttctttttcttactccacctttcataatagtatccctcccttttagaatgtatgtttgtttggtgtttatataaaaaatgtctcctatatttacaagaagacattaattatattcgtcaaataatatttctaatttaacttttatacattcatcacaattattttctttgttaacaaatttaataatgcaattatactttaatcctctatttattatacttgttaattctccactataatatctaggaatgtaacctatatgattctcttttttatcaaataccttgattgcatgaggatcaaatttattttctggttctaactctagaactagagcttcatttgattctaattctattgaattatcacattcatgtccttcacacccagcataatgtcttactcctgcaatataaaaatatctaattatatttttatcaatgtccaaaggaattggatctacaaattctagtgtatctataggtaatcttgcaccacttctttttaaaagttcatatgtatcatactcagacatatcatacttatccaaaattttattgatgtcctttctttttttatcaggtaatctacttgcaaatgggctaaataaatcttcactataatatgttttactaatatcatcaaatgatattaaagcattaaaacctgctttaatagcttcatcaatttcatattcataagaaaattcatacaatccatttttagctaactttccaattataaattgtcttctactttttggatctttccaaataacatataaaaaatcttttccatttttaattgacattttatccctctttcacaaattatatatattttttattcttaacactttttcttttagatatatttttagcaatttttttaactttgggcttataatattttctgaatagttatctattaatgtatttatgtttacttcattcataagatttattatcttttctacaaaatctatagtttgttcataataatttgaatttaaatattttagcacttctaagtgtgttggttcttttttattttttccatctatccttattcttgatcttgaacgtgtatttataagagcttcaaatctttgatgatcagtgaagaaagaatctatgttctcaatattaacataacaacataatgatgatccgttatcatatagaggactaagagtaattttattttgactttctagtagagcccaattattttgatgcctatctctatttccaatcaagtaatcaaaaattaacatttttagaaaatcattttttatgttatattcttctatagatttaaaaatcattttcaatgaatagtattcattatttttataatcatataacttatctgtattataacaaggataatatttgtttattaaccacacgccttcaatcaatttctcatcatttttattgattaaataactcattgaaccaattcttttattatatgtacctatctcaacattagcacaaggaatctttaacaaactagctatttcacaggctaatttttctgcccaatattctccagtttcttttgttttagggaatttaaacaagcctatatctttagttttttcattaattagccagattttctcgcttcttccactaccataagaaaaaccatcatactctttccattcatcaaaatttttaatcacgaaaataatcctctcaaacaagtattttatattcttattgtatcatttgattctaaatttgcaagaattttattatccataataagcttaacttaaaataaaaattttttctagattttatttattccacttttaacttcaagctttattacatatggaatatgtgtttactcatcaaaattactactgtgtataatggttttactttataaatacttaattttagttttctatatttatttggtaatttttttgagtgttgttaagtaagaaatattttttgtaccaaaaggtaagctgatattgctttattcagatactatgcctaggtcaaagtagtaataccatttgttgcttctttttcttactccacctttcataatagtatctctcccttttagaatgtatgtatgtttggtgtttatataaaagagcagattaactgctctttatatacttttgttatgtacaatattatcttaattttgtttatctggtttttacttaattattttcttaatattcttacaattttttagcttttatgtgtagtttattataataatattgaaatatatatttattaagtaaaaaatctataaaagtagaataaatgagtttaaaaaatatcctcatatatgtagaaatttggcaaattagttaatactaaaaatctattatttcctaagtccaacatgcttttcttttttgatagaaattctaatctttttagtaagaagttgatgctaacttgtaattcttcagctatttcgtatacacttgtagcgtgtgaattaataacatgtattatttcttcttctgttataagaaattcacatgcccattttagtgctttgttttcagttttgtctatcaagattttatttttgtaactgttttttgaagatacatagtttccaacactggtaaaatgatgtcctaattcttctgctaagatttctattagtttagcattgttttgttttaatgaattaagtaatgatataatttttagtccttgtctgtttatatacaatccttttatgtcatctgctattttgtcagtgtagtaaatttctatctcttcattatttgctaagtctaaaagtgcgtctagtttgttcattgaaatccccctataaaaagaatgtatgtgttacttttttatatataaagagcaggagtgaactgctctaaatattcattttttatatctatcaactaaaaactctatgtagctattaatatgttcttgcgcttctttaggtaaactttcataagatttaattattttggatatttcatcagtagttatgtaattttcaattgaggttttaccaagtagataatcaactgacacattaaaaaattctgaaattcttaacaagtcttctttaacaggttctcttttgctagtttctaacatagcaattttgcttagtgaacaattaagtaattttgataattctgcttgagttaattcttttttctttcttaattcttttaaccttattggaaaagttgaatttaagcattttgttaatttatttgaatcatctatgttaatttttccaattaagtaatctgtagatactccaaaatagtctgagcaatctttaataaatgattcttttggttctcttaacccattttcaattctggataaagtggatttatttatatttaagtctgtgcttaatttatctaaagaaattcctttttcagttctcaatttttttaatattaacatagattcaatccttattttttatatttattcattaaaaattcaatataatcgttgagttgttcttgagcttcctctggtaaatctttgtgaggattaactctgtgtgcggctacagtatcgatgtgatttctaacaagagttctacccaaaagataatcaattgatacatcaaaaaaatctgcccaattttctagaatatttatttctggttttcttttattattttcatattgcgatattgttgatttattaaaacttgtaaagtaaactttattgaattttgaaactagttcatcttgagtaagttttttctcttctcgtaattgtttgaaacgttctccaaaagttgccacaaacaacacctcccaataattaaatgatactataagtttacagaaacgtaaacttatgtttagaaaaaaataaaaaagttaacaaaaaaataaacttatgtattgacaagttttgtttgtgtgaatataataaaagtatgaagttcacaaaaataaaacattggaaggtgaagaacatgaagaaaagaagtttaaaagctggtcgaatagaagcaggatatacccaagaagaactagcatataagataggaatagcaaaatcaacatataatctaaaagaaaatggaaaaagaaattttacggaaaaagaaatgataatgattagctatattttaaataaaacaatggatgaactttttttagaaaaaaggttaacataaattaaaatttattgttcacaaaaacaatcataaggaggaaagaaattatgaataatttacaaatattcaaaaataagacttttggagaaataagagtaatcgaactaaatggagaattttggtttgttggaaaagatattgcagaacaattaggatataaagatacatctgatgctttgaaaagacatgttgatgatgaagataaaggagtaggtgaaataccgactcctggtggtaatcaaaatatgaaagtaattaatgaaagtggtctttattctttaatattaagttctaagttgccaagtgcaaaattatttaaacgttgggtaactaatgagatattaccaagtatacgtagtactgggacatataatatgatagatttgcaaactaaactaccaactacatataaagaagcgttacaacatcttatagagcaagtagaagtaaatgagcagttacaactagaaagtaaaatgaaagaccaagtaataaaagaactaaaaccaaaggcagattatacagatatgatattaaaaaataaaggacttgtcacaataactcaaatagcaaaagactatggaatgagtggaaaagaaatgaataaaatacttcatgaaagagggattcaatataaacaaagtggacaatggcttttatataaacaacatcaagggaagggatacactcattcagaaacaatagacataactagaagtaatggaatgcctgatgtaaaaatgacaactaagtggactcaaaagggaagattgtttttatatgatttattgaaaacaaataacatattaccagatatagaaaaaggatatagttatcaaacttcaatattaggttagtactttgaaaactaaatacagaatattttagaaaggagagattgaattggaaaataagaaaatagaagaaatagagaaaagaataaccatgcttgaaaatcaattgcaagcacagttatttagtcagataacagctcaatcaaatagtgattttatagattatatgtaccaatgtatagttttgtatttacatgagatgaataaaagtgaaaaaagaaaaattagtgaaattactaaagaaagaatcagaaaataagaatgataattacaatataaaacctattcttctagcaggttttgaagggtcagttttctttactgaagttatcataaagtttatctgtgatgtgtgttgaagaatttcagaataaactccatttactatgccgtagtagtgaattagacaagggttatgataacctacttcttcaacaatcattaagacatcttttccaaagttagtcaattttagtgcaatttcatgttcatcatcaagttctttttcaaattcctctatagatttaagaataattttatattgaaattcagcatagtaaaaatactctgtgttagaagtatcagagactgtctttcttatactttcttgtaattctttagatatattgtttgaaaactgcataatacaccatccttttgaaaattttggaatttattccatgtttatattataccatgtagaactgaggtgaatacaatgttaataggcgacaatataaagcaaatgctaagaaaaagagatataaaaccttataaattggcaaaagaattgaatatagatgtaagtggtttatataaattactgagaaataaaagttctaatccaactatagatactctaataaaattagctgattatttagatattacattagacgaattagttggaagataaataattaaaaagaggggagagaattttcacatggatatttctgagagtatagcaaaacaatttagtgatagtttaaaaagtttaatagaaatagagataagtaaacaagagacagatagagttaagagtcaaactattgaacaaaaggtaaaggtactggagcctaaagatatagttgttttaataaaaagaggttatccaaattatctaataacagtagaagaagcaaggggaattttaaagttagatacagcttttatgcgtaggttagtaagcacaggtttgataaaatcactagttagaggtgatggtagaaaaatttcaagatatgaagttgatgattttattgaaagaaatcaaggtaaaaatttggatgaacttttaaaagcagtagagtggggggatgaaattgctgagtcttgatactaataataagaatgtagtaactcttaaaaaagatggaaaagttatagcagatatagtatttaaagatattaaaactggtaagaaaatatcggttggaatattaaataaaaaagtgttggtaaaataaccaacacacaaaaaaataaaaaataaaatataacacaagtaaagtataacacaaaaaggagatatttaaaatggttgaagttaatgtaaatgtaaaagttaaagtagaagcaccagaatttacaaatgcactattagtagtggcgaatgctttaggaggtcttaatctaggaaaagcaatgcagatagaacctataaatataacagatatgaaagaagagaagaaagttgaagttaaaaaagctgaaaagattaaaaaggtagaagtaaaagaagacgttaaagaagaaatagcagaagcaaaggaagaaatagaaaagaataatgaaaatacaactagtgaagttaaatacacaaaagaagaggtaagaactaaggcagcacaagtaagtaaggcaggtaagaaggataagcttaaggagttatttggtgaatttggagctagtaagttaagtgaagtaaaagaagaagattattcagcttttatgaacaaattagaaagtttatagggggtacataaatgccattacaacatgcaagacttagtgcgagtggagcccatagatggcttcactgcactcctagtataaaattagaagaaaactatccaccattaactagtatatatgcagaagaaggaacagttgcacatgaattagcagaagttaaattaatgctagagtatgaaaaaataagtaaaaaggcatataatgcaagaattaaaaagatacagaaaagtgagtattataactctgaaatggaggactatatacaatcttatgttgagaatgtagttgaattagtaaatgatagtaaagctatatgtgatgatgtaatagtgatgttagaagaaagactcgattttagtgagtgggttccagaaggatttggaacaggagacgttgttgtaatatctgatggtatacttcaagttatagacctaaagtatggaaaaggtttagaagtttcagctatagagaatcctcaacttagactatatggtttaggggcatataatcagtttgaaatgctatacgatattgatttaattaaaacaacaataattcaacctagacttgataacatatcaagtgaagaaatagaagttactaaattacttacatgggcagataatgttaagaagaaggctcaaatggcttttaatggtgaaggagagtttgtaagtggcagtcattgtggattttgtagagctaaaaatgattgcagaaaaagagctgaggataaccttaaactagctagaaaatatgattttgctgacacatttgctcttaataaatatgagatagcagatattttaggttttgctaagaatatacaagattggttaaaggatgttcaaagttatgcactagaacaagctgaaaagcatggtgttaaatatccaggatataagcttgtagaaggcagaagtaatagaaagtatgtagatgagcaagaagttgctaaggttttattaaattcagattatgatgaagaaaaaatttataagccaaggaccttaaaaggaattagtgatatggagaaagctataggtaaaaagagttttgctaaactactaagtgatttaattataaaaccagttggaaaagctactttagtagtagaaagtgataaaaggtcagaaattaatagtatagattcagcgaaaaaagattttgaaatataaatgggggatattacatgccattagatgcaggtataaaagataaattagatgaaagcataagtataattttagatttaaaggatagaaaaaagagtatcgaaaaagatttagattatgaaaaagataatttactagatatgttaaagagactaaatattacagaatataactcaactgaagaaaatgcaaaagttatagtgatggattttaaaagagaaagtttaataaaggataaagtgatgtcaactttcctcgaagtaaatgacaatcatcttgatagagtgtatataccagaacatataaaagttagtccagtatgctttgtatcagtaagagcaaaggataattaaaaatatttaattcctagtagctataaaaagatttaaaaggggatataattttatgagtaatcaagaaataactaaactagttgaaaataatttgaatcttgtacattttagtataaatagattttttaagtcttatgtagagcaacatccatacttatatgaagagttttatcaagaaggatgtattgggttatataaagcagcattaaattatgatagtaacagaggcaagttttctacagtggctgtttcttacataagaatagaaatgtttaaagctttgcgttatggcgaaaaacattatagaaactctatagaaggtttagatgtaagtgtatttgaagatagtaaaagaccattaaaagatatacatggattttatgaaattcaatttaactatgatgttgattatataagaaaaattgcaagaaagtcatatttaaaagatattgataaaatagtagattggattttacaagataaaaagatatctgatataggagagttattaaatgtttcttcaacagttatttgtggaagaattaaattgtttagtaagcaagttagagatttagataaatttggagaaataacttcaaatataaaatcaatataccaaatataaaaatattaggaggaagaaaattatgagtaattcagtacaatcaacaaaggtagtaacaggaaaggtaagattaagttattgcaatatctttaaaagcagagcaatggtagaaggtgcagagcccaagtattcagtttgtattttaataccaaaatcagataaggtgactttaggaagaataaagaaggctattgatgcagctaaagaacaaggtaaaacttctaaatggggtggaaaattaccaggtaatttaaaaacacctcttcgtgatggagatgcagaaagagctgatgaagcagaggaatatgtaggaatgtattttttaaatgcaaatagtacacaaaagccaggaatagttgataaagacttaaatgaaatattagataatacagaggtatatagtggttgttatggaagagttagtataaactttttcccatataatagtgcaggaaataaaggaataggttgtggcttacaaaatgttcaaaagttagcagatggagaagtacttggaggagctagagctagtgcagaagcagatttctcagatgactttgaatatgaagatgaagaagaggacttcttaagttaatgaggaccttatcaattgatatagaaacatatagtgatttagatataaaaaaagttggagtctacagatatgtagactctgctaattttgagatactgttatttgcctatgcttttgataatgaagaggtaaaagttattgatttagtaaatgatgaagagttaccaaaagaagtaatagaagctttaaatgataataaagttataaaatcagcatttaatgctaattttgaaagaacagcaataagtaaatttttaaatattaatttaaaaccaaatgagtggtcatgtacaatgataaaggcgttaacactaggacttccaggaagtttagatagtgtgtctaaggctttaaagtttaatgaagataaacagaaaatgaaagaaggtaaagcattaatacaatatttctgtaaaccttgtaaggctacaaaagttaacaagggaagaactagaaatttaccaatacatgatatggaaaaatggaataaatttaaagaatattgtaaacaagatgttgtagttgaaagagaaataagaaacaaacttagtaagtataagactaccgaaagagaaattaaattatggtatttagaccagagaattaatgatactggtattaaagttgatacagagttaatagagaatgcaatagaatgtgataaaagatatactgaaaaacttacaaaagaagcaattaaaataactggtctaaataatccaaatagtccagctcaattaaaaaaatggttaagtgataaagttggctttgagattacaagcctaacaaaagaaagtattccagaaatattaaaacaagttgatgatgaaaatgtagttagaattttagaacttagaaaattaatgtccaaaacttctataaagaaatatgaggctatgaaattagctaaaggtaatgacaatagagtaagaggtctactacagttttatggggctaataggactggtagatgggcaggaagattagtacaagtacagaatttaccacaaaatcatatagaggatttagacctagctagaaacctattaaaagaaggagattttgatttaatagagcttttatatgatagtgtaccagatgtcttaagtcaattgataaggacagcttttataccaagtgaaggtcatagatttatagtatcagattttagtgcaatagaagctagggttatagcttggttcgctggtgagaagtggagattagatgtatttaattctcacgggaaaatatatgaagctagtgctagtcatatgtttaaagttccaatagaaagtattaaaaaaggtgacccacttagacaaaaaggtaagatttcagagctagctcttggatatgggggaagcataggagctttaacatcaatgggggctataaaaatgggtcttgatgaagaggagcttcaacctcttgtaacaacatggagaaatgctaatccaaatataactaaattttggtgggatgtagataaggcagctaaaaaagccataaaagataggactatagtaaaactccaacatgggattaaatttatttataatccaggagttttatttatagaactaccaagtggtagaagattatcatatctaagacctaagatagagcctcatactacatttagtggggataagataacatatgaaggtatggaacagacaagtaaacaatggaaaagaatagatacttatggacctaagttagttgagaatattgttcaagctacagctagagattgcttaagagaggctatgtttaatgtgacagatgcaggttatagcattgtaatgcatgtacatgatgagcttgtaattgatgtagataaaaaaggaggttctttagaagaagttaacagtattatgggaaaagaaatatcttgggctaaaggtcttcctcttaaagcagatggatatgaatgtgattattataagaaagactaggtgattgatttatggatataaaggccagtgaaattgaacacataaatgtaagacatgatggccaactcatgctggccataggaaaaaataaattagaaacacattggaaaaataaaagtattttatggtccgaacttgtaaatagattaagtaaaacattaagaactcaagaaacatatacagaatataggaagatgtcaaagactgaaaaagatagagttaaagatgttggtggatttgtaggtggaagcttaaaaaatggaagacgaaaagcagagaatattgcaaatagaagtattataactttagatatagattatgcgaataaagatatatgggaggatataacattattaaatgattatgcttgtcttatgtattctacgcactcacatactgagaataatcccagatatagacttgtaatacctttaactagaccagtactaccagaagaatatcaagcaatttccaggatgatagcagatactataggaatagatatgtttgatgatactacatatcaacctcatagacttatgtattttccaagtacttcaattgatggagactatatatttaaatttcaagatggagagtttttaaacccaaatgaaatactagatttatatttagactggacagatgtaagctattggccagaaagttcgagggagaggcaaaagtttaatacacaattaaaaaaacaacaagaccctattgaaaaggctggaattataggtgcattttgcaggtcctatagtataaaagaaactatagaaaatttcttaaatgaagtatatattcctggtattgatgaaaccaggtatacatattcagaaggtagtacaagtggtggagtagttatttatgatgacaagttttcatatagtcatcatggtacagacccagcaagcggaattttatgcaatgcttttgatttagttaggatacataaatttggtgaacttgatgaagatgctaaacccgaaacgcctgtaaatagattaccttcatttactcgaatgagcgaatttgcaagcagtgacactaaagtacgaaagactataggaagagaaaaccttgataaagctaaggatgattttggtgatatagattttgaagatgatgaatggttaactaggttagattatgacaataagggaagttataagaaaacaacaaacaatatcttaatgtttatagaaaatgacccatatttgaaaggaaaaatagcttataatgaattttcaaatagagctgtcgttttaggtaagttaccttggagaaaagatgataaattaaatgattggaatgatagtgatgattctgggcttagacatcatatagaaacaatttacaatatctcatcaccatcaaaagtaaatgatgctctaataattgcttttgaaaataatacttttcatcctataaaagattatttaaattctttaaagtgggatggcattaagagagtggatacacttttaattgactatttaggtgcagaagataaccactatacaaggactataataagaaaagttttagtagcagcagtagcaagagtatttaatccaggaataaagtttgataatatgatggttttatctggtcctcaaggaatgggaaaaagtacttttattaaaaaacttggtggagactggtattctgatagtttaactactgtacaaggtaaagaagcgtatgaacaattacaaggagtatggttgctggaaatgggtgaaatgatggctactaaaaaagcagatattgaggcagttaagcattttctaagcaaatcagaggatatatatagggtcgcatatgggaagagaacatcaaggtttttacgtcaatgtgtagttataggaacaactaatgataaagaatttttaagagataagaccgggaatagaaggttttggccaatagatacaggagtaaagaaggttaacaagagtatatttaatggtcaacttgataatgaaagaaatcaaatttgggcagaagcagtagaattatgtaaagccaatgaacagctatatctatcagatgaggagaaaaaagaagctgaaagacaacaaagaactcactcagaagaaaatgctaaatctggaattatcgaagagtatctaaataaacctattactgagaattggtatgatttaagtatttcagaaaagagagaatatattcatggttcagattttggtgatttaaaagaaggaacaatattaagagaaaaaacgtgtgttatggagatatgggttgagctatttaatggagaacctaaacaactcacgcctatcttatcaagagaaattaatgatatattaaaaggattagatgattggatatcatataatggaaatttaaggtttgggaaaatatatggtaggcagagagcttatgtacgtaaaagttagtgtcaacagaattaaaaacagagtaaatttgaaaattttaaaagtgtcaacaatgtcaacaaaaaaaatggctttgttgacgcttatgttgacacctaagatgcagtaattacaatgtttgaggtattaatgtcaacaatgtcaacaaaaattaagtataaagtagtataagtaatattaggcatatacgtatatacatatgtatgcctaatatgtatatatacatatatatagaaaatctgttgacattgttgacacttaaattttaaggaagtgatattttgttagaatcaaaaatagaaaaaagacttaaaaaagagattgagttgttaggtggaaaggctatgaagtttatttcaccaggtgaggcaggtgtgccagataggattgtcttattaccagaaggacatgttatatttgtagaacttaaagcaccaggtaaaaaactaaggaagcttcaacaatataaaatgcgagaattaagagaattaggatttaaagttaagtgtgtaagcacattaaaagagatagatgattttatcaaggaggttaagggatggaatttaaaccacatccataccaagaatacacaattagaaaaactatagataataataatataggtttactattagatatgggattaggtaaaacagtctgtactctaacagctataagtgaattaatgtatgattactttgatatatcaaaagttttagttatagcacctttaagagttgcaagagatacctggagtagtgaagtaaaaaaatgggaacatctaaagcatctaaaagtatctaaagttcttggtagtaaattagatagagtgagagctttaagtacagactcagatatttatataataaatagagaaatggtaccctggatagtggatttttataaaagaaaatggccatttgatatggttgtgatagatgaacttagttcttttaaatcaaataaagcacaacgatttaaaagtttaaagaaagtattgcctttaactaaaagagtagttgggcttactggtacaccaacaccaaatagtttaatagacttatgggcacagatgtacttacttgatagaggtgaaagactaggtaaaactattacaggatataaagaacgatactttgagccaggacaaaaaaattatcaaacaggagctatatataattggcaacctaaaaatggagcagaaaatgcaatacataataaaataaaagatatttgtataagcttaaaagcagaagattatttgaatatgcctagaaaaatagataataaaattgaaatacaccttgatagtaaaatacttaaatattacaaagaattagaaaaagagaagatattagaattagatagagatataataacagcttcatcagcagctgtagcagcaaataaacttttacaattagctaatggagcaatttatgataatgataaaaatgtaaaggaactccatagagaaaaattagaagctttaaaagaaattatagatgtttcaaatggtaagcctattatagttttttataactataaacatgattataatcgtttaatgaaagagtttaagagtttgaaaccaagaacaatagaaaactcaaaagatatatatgattggaataatggaagaatacaattattactttgtcatccagcaagtacaggacatggacttaatttacaatcaggtggaagtataattgtttggtttggattaacttggagcttagaactgtatcaacaagctaatgcaaggctttatagacagggtcaaagggaaactgttattatccatcatctaatctgtaaaggtacaatagatgaacaagtaatggaagctatagagaataaggataaagggcaaagtgcattacttgaagcagtaaaagcaaaattaaaagaatatagggagtgaaggtatgaaagtaaaaagaaaagatggaacttataagcccaggtaaaatagtaagatgtgcttggtgtggtagaagattttataagttggataaatctaaagttgagtattgcagtagaagttgttcgaagagagcaagaaggagtgatttaagtggataaagaaagtataaaagaaattgtaagagagttaagaaaagaagaaagagaagataggaaaaaaggcgttttatataatactagattattgatgaagcattataatgattttaagagacatatagactcagcggtaagtgaagctaaagatgtagattacttagaggatgatttaggtaagcttgataatgaagagttgtatattttaagtataaagaaaagtaaagcaagaactattattatgatagcacatatagattcagcaatgaaaactttgaaattaagacaagagcgtttacattcttatgaaaagtatagagctttagagctttactattgtgatgaaaaaacatatgaagaaatagcagagatattaaattgtggagtagttacatcaagacgttggattaatgaaatggtaaaagaacttggagtgtatttatttggtatagatggcttgaaattaactgtttgataaatacatgataaaaagatgatattttaatgatatttaacccctgttataatggtagtatgaaacaagtgtataatatattcccccttgaaaaaggctaagttaccccaacttagtcttttttattttgtaaataaggagaatgataaatgagtaattcatgacttagagtgatttctaggtctttttttatacaattttaatctctcatattgaagggtcgaaaataagggtgttcaaattgaatattctttattaataactaatttaggaggtagtagtatgttgaaaattttacaagagaaaaatgtaaggatgatatggtcaaaaaatggagaagaagtttggtttaatgcaaatgacgtaggagaggaactaggcatagtaaatattcgtgatacattaagaaatatagatagagaatataaaaagaaatttaatgagtctactgtcggagattcctacactagaaactttaaagataaattgcctaactttggtactacttttgttacagaagaagctgtgtacaatatgtcatttagaagtaataaagcagaagcaaaactatttacgaagtgggttacaaaagcacttaaacaaattagaatacatggttactatattgccacagaaaaagatcaagaatggctggatataagaacagaaggtaaaaggtcagaaaagattttacagatgaaatacaagagtttttttattaatacaagtacttgaaagagttatatctatgaaattacctaggttgatagataaaggtatgaattataaagaggtatataaaaagattaaagaattaatcgaaatgatttaaatgactgtattaatagagggtctttttttttatgtaatgaattaaaaatgaaatatatttgtacattatagacaggaataaggtaaaagtattatttagacttattttgtggttgtcgaatgattattgaaggatattgactgattatatagaattatatcattataaatatttgtgaaaggaataatggtataatgagtaattttaaaaaaagatatattgatgtttatagaatagatattataaataaaattaatgggagtgtctattcagatgaagaaattttaaaagaggtaataaagaccttctttaaggataaagaatattgtaaagaaaacaaaaatggaattaatattactaaagataaaaagttttggattacagaagtaaaatgtagcgaggatgatttaataatcaaggtgaaacttgaatatactaaatacaatcagaatacaaatattataaatgctcatactaaagaagtagagggtaataaaaaaatggatcaaggagatagcaataagcagcacctatttattaaatttatgaaggaaaataatatagcagtagtattatttgaaagagtttttgtgggggttcccatgattgaactaagtaaaaacttacatctatattatgaggatatgattgaaaataataaatttgataataatatgtcaaaaacatcaattaatattacacaaatagcaagtaaagattttatagaacaaatattagatttagatggtgtttcaaaaataactttaaatgttgatagagagaagtttggaactgatgaagataatttgttttctaatttaaataattcaagacgacataacgatttgatatataagcccacatttagaactagatatttacctagtgaagttaaaagatgttgcgaaaaatatattaaaggagaggaatttagaaataaaaaaataaataggataataattgagggagagaaaaataagagaaaattaaagttggatactgagggtataaagttgtgtagagaaatagaggtttctcttgatatagataatcatatagatagtgaagacatttttgagaagatgaataatttgatagatgatttaattgagaataattcagttttttttaatttaatgtatcaagaagttgctatgagtgaagcatagattgctaaggaggtgttaaaatgtataaaaaggtattaaatatcttactcaattattacaaggctataaattctaaagaagtagtagagttagttttaacaccagtattaatatgtattatttcatacatgttttttaattcgtcaattaataaagaagttgtaatttctttaaacaaagatgtactaactttgtcaggactattagtagcttttggagtttgcattattacattattgtttactacatataacaaatcaatatcagaagcaaaagatataaaaacagaaagaaaggtaaatggatttaatatatcatactttcaattcatacagttaaaagcatattatactgtaataatggagattttggttgttgtaatatgttttatcaatacaataatgcttactcgatattattctaatataattttctatgttttaatattttttacagttcatataattttatctctaactacattaataataagtatgtttcatttatcctggaaggatagaggagactagatttgaaacaatcctattaaataggattgtttttttattcccaaaacaaacaaataaagaggtggtgatgtgcaagatgtcaaagaaaaggtaaaacaagattacttaaaaggaatgaaacaaaaggaaatatcagcaaagtatgacattagtttaaatactttaaagtcatggataaaaagatacaattggtctagtgaaaaaaagaagggtgcacctataaataaaaggggtgcacccttttctaataaaaattcagttggttatggtgctccaaaagagaataaaaatgctgaaaagtttggtttcttctcaaaatacttacctgaagaaactagggaattaatacaagaaatatctataaaagataaatttgatattctttgggaacagataacaattcaatacgcagcaataataagagcacagaagataatgtatgttaaagataaagaggaaatgattaaggaattaaagaaacatgaaatcacagaaaatagtgagaagatagagtatgaatttcaatttgcatgggataggcaagcatcttttcttaatgcacagagtagagctatgagtgagttaaggagtttaattaagcagtatgatgaaatgattcataaggattggaatttggctacagaggagcagaaaacaagagttgagaagttgaaatgtgaggttgctaacctaaataaagatgatattggagatgatgagttgaaaataagtgtagattatggtgatagaaatgatagttagaataaattttaatccagatttcaaggaagctaattttactaaaaaaagatacagagcaatgaaaggttcagcagggagtggaaaatctgttaatgtagcacaagactatatactaaagttaggagataagaagtatcaaggagctaatctattagtagttagaaagtcagaagctacacataagtattcaacgtatgcagagcttacaggagctataaatcgtatttatggtaaacaagctgataagtattggaaaactactttaaatcctttagaaattaagagtaaagttactggtaactctataattttcagaggagttaatgatgcaaaacaaagagaaaaattaaaatcaattaacttctcgaaaggaaaattaacatgggtttggtgtgaagaagctacagaacttatggaaagtgacatagatatactagatgaccgtttaagaggtattttaactaatcctaacttgtattatcaaatgacatttacatttaatccagtctcagctactcattggataaaaagaaagtattttgactataaaaatgatgatatatttactcatcatagtacttatctacaaaatagattcatagatgaagcttactacagaagaatgcaaatgagaaaagagcaagacccagaagggtacaaagtatatggtcttggagaatggggagaaactggtggagcaatacttaaaaattatgttatacatgaatttcccacagaatttgaatactttgacaatatgagactgtcacaagactttggctttaatcatgcaaatgcaatacttagaattggctttaaggatggagagttatatatatgtaatgaaatatatgtacatgaaatggatacctcagaaatcataaaaattgcaaatagtagaggtttagaaaagactctatttatgtactgtgatagtgctgaaccagatagaattaagatgtggaagagtgcaggatataaagctaaaggagttaaaaaaggaccaggaagtgttaaagctcaaatagattatttgaaacaattaagaatacatgtacatcctagttgcactaataccataaaagaaatacaacaatggaaatggaaacaagacgaaagaactggattatatcttgatgaaccagttgagtttatggatgatgcaatggctgctcttagatattctatagataataagcttaaaaataatggaataagcttcttaaagtaaaggaggtgttaaatatttatataagtgaaacagatttaataaaagttcagttaaaaaaagagagcacctttaacctagtaaaagtcatagaacactacatcttaaagcataggccagaaaaatataaacaaggagaagaatactattatggtaatactgatgtaaacaataagagaagatattatctcttagatggagctaaggttgatgattttactaaagttaataataaagcaattaacaactaccataagcttttagttgaccaaaaggtaggctatagtgtcggaaatcccatagtatttaatgcagatgatgataatctcactaagcttttaaatgacttactaggagaagagtttgacgatacaataacagaactatatctcaatgctagtaataaaggggttgaatggttacatccatatattaatagaaaaggtgagtttaaatatgtaataattccagctgaagaagcaattcctatttgggatagtaaaagacagagggaattagttgcatttattaggttttattatattgaagatatagatggaaataaaataaaaagagttgagtactacacagaaaatgacgtaacttactttattgaaagaggtaatagttttattcaagaatttttatatgatgaatatggaaaaatgactgatatacaagaaggtcattttagaataaataacaaagaacagggatggggtaaagttccatttataccttttaaaaataatgaaaagtgtgtctcagatttaactttctataagtctttaattgatatatatgataataacatttctacacttgcagacaatttagatgaaatgcaagaggtcatttatgtattaaaagagtatccaggaacaagtctacaagagtttatagataatataagatactataaatcaattaaagtagatggtggaggtggagttgataaactagagataaatataccagttgaagccaaaaaggagcttcttgatagattagaaaagaatataattatttttggtcaaggagttaatcccgaatctcaaaacacaggtgacaaatcgggtgtagctcttaaatttttatattcactacttgatttaaaatgttccaagactgaaaagaagtttaaaaaagcaattagagagcttttatggtttgtgtgtgagtatttaaagataagtggtagtaagagctatgattataagtcagttcaaataacatttaatcattctatgataataaatgagtctgaaaaaatagatatggcttctaaatcaattggaattatatcagatgaaactattgttagtaatcatccttgggttgaagatgttaatgacgaacttgaaagacttaaaaaacaggaagaaacccaaaaagaatatgatgatttaattcctactaataatcaagagggtgttatagatgaaacataaagattattggaggaaaagatttgaacaattagaagaagttcaaaacaataaaagtgtaaaatattatcttgaattggaaaagaaatacaaattagctatgaatagtatagaaaaagatatattatcatggtataacagatttgctgaaaatgaaggaatatctttattagaagctaagaaactgttaaatacaagagaattagaagaatttaagtggaatgtagaagagtatattaaatatggcaaagaaaatgctataaatcaaaagtggatgaaggagttagaaaatgctagtgcaagacttcatataacaaggcttgaagctttaaagttacaaatacagcaacacgtagaagttttatatggaaatgaacttgatggtattgataaactaatgagagatatttatacaagtggatactatcatacagcttttaatgttcaacaaggagtaaacgttggttggagtttaatgagtcttgatactaatagaataaataaaattatctctaaaccatgggcaacagatggattaaactttagtgaaagaatttggggtaagcatagacctactttaataaatgaactacatactaagctaactcaatcaattattagaggtgaaaatccaaaaaatctagtaaatgactttgctaagagatttaatgtatctaaatcacaagctaagaatttgataatgactgaatcagctttctttgcatcagcaagtagaaaagattgttttagtgatttagatgtagagaaatatgagattattgctacattagatttaagaacttcaaatatatgcagagagttagatggaaaaatatttgatatgaaagattatcaagttggaataacagctccaccatttcattgtcgttgtaggacaacaacagctccttggttcgaggatgaagaaggctatagagcagcaagaggagaagatggaaaaacatattatgtaccatctagtatgaagtataatgagtggtatgagaaacatatagagggtagacttggaaaagaaaaagctgacacccttagaaaaatgcaactaaatgagagtaaagatagaaaacaatttgaagaatataaaaaggtattaggaaatgaaataccttctaaatttgatgaatatcaacatatgaagtataatgatactataaggtatgaggaagctaaaaagctttataaggatgtaaattggcaagttaagaatcagagaaatttaactagtggaagtgttcattcagtgccatttgaatcaaaaccaaatagtgtatttgataattacaaagatggtaaattaattcaaagaagatactatggtaatacaggaaaacctagattagatttagacttaactgaccatagaaacccaaagcaacataaaattgtacctcataaacatgattggttagctgatgaaaataaccatgataaggtaaaaagagagaaggatatggagcttacaaaagctcataaaatagctaacaaagatattttgaatggagaataaaatggataataaatttaagaatttacaacatttaattgattctattgatttaggattagatatagaatttgacttatataataaaccatataatatatctattggagatgatgatacaaggtttattactctttgccctaatggagatacaaagtattataaaaatggtaaggatatggttgataattacaacattgatggtaaattactaaaggatttatggaaagatatacaaatagtaaatatgtaaaagcacttgctaaataataaattagtaggtgcttttattttgtaaaaaatgaaaggagaaatttaaaatggattggttaaaagaattgctagaaggaataaaagtagaggataacaaaattgatgtagcttctcttcaaaaatctatagaaaagaaaataaaggagactacagttactcaagaagattatgtaaatcttgaaacacaacttaatacagctaatgaaactattaaaaagtttgaaggaggtatgacaaaagaagatgtagagaatctaaaaacaacttatgaaactgataagaaaactttggaagaaacctacaaaaaagaaattgaagaaaaagattttaattactggttaggtgatgcttttaaatctgttaaatgtagagatgaaatagcgttaaaagctcatttagacatggaagccctaagaaatagtaaagatagacaaaaagcttttgaagagcaaataaaccctttgaaacaggataaagattatttgtttaatgcaacactagaaggtgaagaacctaaaatagatactataacaccagggcaagagcctaagataaatgattttggttttaattttactggggtaagacctcatgaaaataataataaataggaggaaataaaatggcagcactaaattatgcaaaagaatattcaaatgttttagcacaagcatatccttatactttaaacttcggggatttgtatgcaacagaaaataatggaagatatagatggacgggttctaaaacaatagaaataccaactatatctacaactggaagggtagattcaaacagagatacaatagcagtagctcaaagaaactatgataatgcttgggaacctaaggtattaactaatcaaaggaaatggtcaacattggttcatccagcagatataaaccaaactaattatgtggcttcaataggtaatataacaaaagtatataatgaggaacaaaagtttccagagatggatgcttactgtatatctaaaatatatgctgattggaccgcattaggtaacacagcagatacaactgttcttacaacagcaaacgtattagaagtatttgataagttaatggaaaaaatgacagaagctagagtacctgaaaatggaagaatattgtatgttactccagtagtaaatacacttatcaaaaatgcaaaagagatacaaagaacagtaaacataaaagatggtggaacttctttaaatagacaaaccacagatattgacacagttaaaataattaaagtaccatctaatctaatgaaaactgcatatgattttacaactggatggaaagtaggagcaggagctaaacaaatctttatgtccttagttcacccaagtgcaataattacacctgtttcttatcagttctctaagttagacgaaccaacagcagttacagagggaaaatacttctactttgaagaaagttttgaggatgtatttatattaaataaaaaagctgatgcaatacaatttgttgttgaagcatagaaaaaggagtgatatatagtgccacaagtaaaaaaactaaatagaatactaaccatagaagaatgtaaaatagatgatttcttagagatgggatatgatttgatagatgaaactggtaaggcagtaaagtatggcaagtcattaagtgtaaaagatttaatagctgaaaataatattttaaggtcaaaagttgagtctttagaagaagaaaataagcagcttaaagagaaaaataaacttactaaaaagtaggtgaaaattatggaaaataatataattgatgaaatagaaaaaagacttgaaagttttggatatatattaaaagatggagataagtggttaataggttttgtaagagaaaaaatagaaaatattattaaactagattgtaatataaaaactatgccaattgaattgaaagaaattgaagttgatatgatagttggagagttcttatttaccaagaaaaatatgggtcaattagatatagaaagcattaactttgaagctgtagaaaagtctatatcagaaggtgatacaaaggtagattttgctataggaagtggttctcaaacaccagaacaacgctttgatagcttaatagcttatcttactacttatggtaagaataagatattaacctttaggtgcttaagatggtaagtaaaactagaaaagcaatagaaatgttatatagagataaatgtactatagttgagtatcagccaattaaagaccctgtaacaaaacgaactaacaataaagaagtgattgtattagaaaatcaaccatgtaaactttcatataaaaatatagtttctgctacagaagggaaattagctaagctagagcaaactattaaactctttatatctccagatatagaaattaaagcaggttcaaaacttattataaatgataaagagtatgtaagaagtggagaatcagctatatatccaaatcatcaagaaataatacttgagttatttaaggataaagcataatggctagatggggcagtgttgattttagagagtttaaaagagtttgtaaaaagatggagaaatttacaaagattgatttagataagttttgcaaggatgcagcaagagaattagcagcaagactcttaggaaaagtaattagaaggacaccagttgatacaggatttttgagagagggttggagtggagtagcttatgctaggtcgcttcctgtttacaaacaaggtaataattatattatagaagttgttaatccaactgaatatgccttaacacaatggggcatataaaacccagcaaaatcggtaaacgctaagtgtaatagtgttacattataaagtaggtagaatatggacatagaataactcttgatttataatgtataaaagaggtgattttatggcaaaatttttagatattacaggaaaaaaatttggaaggctaagagtcattaaattttctaaagagataaaaagcggtaaaagaaataggaaatattggttatgtaagtgtgattgtggaaatttcaaagaaataagaactgactctttaactagtggcttagtgcaatcttgtggatgtttaaaaaaagaacaagataaattaaatttaacagacaaataccaatttaaaaagaaatataaggttcaaaataaaagactttacagtatatggaagggtataatatctagatgtacagataaaaataataaaagatacaatagatatggtgaaaggaatataattgtgtgtgatgaatggttttgctatgataattttgcaaattgggcattgagtaatggatattcagagaaacttacaattgatagaataaataatgaaggaaattatgaatcaagcaattgtagatgggtggatataaagacacaatgtagaaataggtcaacaaatatattagtaaaacatgaagaaaaagaaattacattgatagagctttctgaaaaaacaggtatttcatactcttgcttaagaagtagatattctaagggattagtaggaaataagcttatagaaaaagttaagattattgaagaaagcagagctaagttatctattgaggatgtaaaagaaattagaaaaaagtattctgatggatatacaataaaacaactaagtgaaatatatcctgtaacatattcatctatatcaaatatagtccatagaagaacatggaaaaatatttaattaattatatatgccaataccgaggaaaacctatagattgcggataggctataggtttccgtagagcgtagagagtgaataaatataatctctccaagagtgctgggcaactaaataaagtttattttgttgatgatgtacgccgaacttataggaaactataagagctagaggataaaaagcctttaggataacaaaatgcatatgttgaatttggtcatagaactaaaaatggcaagggttgggttaaaggacaacatttcttaactatttcagaaatggaactacaaagtcaagttgataagataatagagaaaaaactattaatattgcttaaaggagtgtttgatgcttaataatattatagatggaatatcagtaaagttagataaatcgtttggagaaaaatatacaatttatagcgaagatgtggagcaaggtattaatgaaccttgtttttttattgttcctttaaatccaagcaagacaccatatccaagcgggagagaattaaagaaaaattcttttgatgtacattatttccctcgttcagaagataagaattttgaaataaatgagatagctgagatgctactggaggaattagagtatatagaaattgatggagatttagtaagaggtacaaatatgaattttgaaattatagacaatgttcttcacttctttgttgattataactattttactataaaaaataatgataccaataagatggatacagtagagttattcggtggtttgaagagaggtgataattttgagtaaagcattaagcaaagaagataactacaagtttactaaggagcagatagttaactctaagaagtatgtaaatagaaaagatttattaaatgcaattttaaaagaaaatgagttatattccttctcagaggtagaggatagaataaataaatttatgaaaggagtgagttagatggctttaggtggaggaacattcgtaacgcaaaataaaatacttcctggtgcatatataaattttatctcagctaagagggcaaccagttcattatcagatagaggtattgttgcaatgcctttagagttagattggggcatagatgaagaagcattccaagtaaccagtgatgattttgagaagtattcagtgaagtattttggatatgattatactcatgagaagctgaaaggtttgagagatttattcaaaaatataaggttgggatatttttataaattaaataaaggcgttaaagccagttgtactatagccacagcaaaatatagtggtataagaggaaatgacttaaaagtaacagttacaacaaatatagatgataatgctaagtttgatgttgtaatacttttagataataagaaggtagatactcaaatagcaaaggttattacagacttacaagacaatgactatatcacttggaagaaggatgcaacactagaagcaagtgcaggacttgtatttactggtggaaccaatggcgaagctgtgacaggagcagagtaccaagctttcttggataaaatagaaagttattcatttaatgcactagggtgtttggctacaacaacagaaattaaaagtttatttgtagaatttacaaagagaatgagagataaggtaggagctaagtttcaaacagtactatataagaaaagtgatgcagattatgaaggtgtagtgtctatagaaaataagattaaagataaagatttagttgaatctagcttgatttattgggctactggagctatagcaggatgcgatataaataaatctaatactaataaaaagtatgatggtgagtttgatgttgatgttaattatacacaaatacaacttgaagaagctttaaaaactggtaaatttatattccacaaggtgggagatgaagttcatgtgttagaggatataaatacttttgtatcatttacagatgataaaaatgacgatttttcaagtaaccaaagtgttagagtacttgaccaaattgctaatgatattgcaactttatttaatgaaaagtatttaggtaaagttccgaatgataaggcaggaagaataagtttctggaatgatgttgttaaacaccataaagaattagagaatataagggcaatagaagattttaaaactgatgatgttagtgtagagcttggaaatgataagaaaactgtcatagtatctgatgctattaaggtaataaatgctatgagtaagctttatatgactgtttcagttaattagagaggagagtgataatatggctcaaacaataaatgctaaagatacagttagtgcaaagaaagctgaatgttttataactatagaaggtaaaagatataattttatgcaagctatagatttagaggctaaaatggaaaaaaataaaagtgaagttccaattctaggaagaacaacaaagggaaataaaacaactgggagtacaaatactggaagtgcaacatttcattataatacttctatttttagagaattactttacagatataaagaaactggtgaggatatttattttgacatacaagttacaaatgaagaccctacatctgctgtaggaagacagacagtagtacttaaagattgtaatatggacagtggaataattactaaatttgatgctgatggtgagtatttagatgaagatatggatttcacttttgaggattgggaattagttgaatcctttgcattacttaatggaatgttataaaattgaattatacttgaaaaatattatgatgtaagtataaattatttggaggtatttcatggaatttgaaagtggaattaaattaggcaaacttactttaattaaatatttagggagaaataaacatagtaaaaaagtctggctatgtcaatgtgagtgtgggaataaagttgagagagtagaaaataatttaaagcaatcaattaaaaatgagaagcctccacattgtggttgttctccaaactggaaaggacaaaataagagatttaaagatataactgggaaaacttttgggaagcttacagtattgaaaatgtctgggaaagataaatatagtcacaatttatggttatgtcaatgtgaatgtggaaatagaacaataactagtacaagtgcattagaacaaggaaaagcacaaagttgtggctgtataagaaaggaaatattactagagcgctctacaacgcataataaatctaatgatagcttatatagagtttatcaccgtatgattaaaaggtgcacaaataagagtaataaagattataattattatggaggtagaggcatagaagtatgcaatgaatggctagaggattttataaatttttataactggtctatagaaaatggatatagaaaaggtttaacaatagatagaattaatgtgaatggaaattacgaaccatcaaattgtagatgggttacttgggaagttcaacgaaataataaaagaaatagtattagagttaattataaaggtgaaatgattactttaaaacaatgtgcagaaaatttgaatgttaagtatctatttctttataatcaattagttactaaaaaaattccattggaagaagtaataaaaaatataggtatggagtaaaatacacatttataagttataaatgtgtattttttatatgaaaaattaaaataaaaggagattagaataatatgagtaatttaagtgcttttttaagtcaaaatgcaataaaggttgataatgtaaaatatgtagcgagtaacagatttttagataaagaagggaaaccagttgaatgggaattaaaagttttatcatctgaagaagacgaagcactaagaagaaagtgtactaaaagagtaaaagtgattggtaacaatggtaagcatactggacaatatacaagtgaaattgactacaatagttatgtagctgaattatgtgtagcatctacagtatttccagatttaaaggatgccgaactccaaaatagttatggagtaatgggagaagctcagttattaaagacaatgcttacagcaggtgagtatgtcaattatacagtaaaagtgaatgaagtcaatggatttgatacatcttttgaggataaagtagaagaagcaaaaaactaatcagaggtggcgattttgatgctagcatcactcattattgtattcaaaaattaaagtggaagccaagtgaatatatgaatttagaagttaatgagagagcgttagcagccgcctcaatacttataaagatagaagatgaagaggaagcaatgaaagaagctgaaagagagagaaagaggggacgaagaagatagcaaaataaaaaaataaatatagaataggtaaaatatgtaataattatatgttataatatttttagcaagaagatgtaatctacaatttatagagtggagttcatactgggataaaacctacttcctaatgaaaggaggtgggaagtatgaataactttttacttaatgtaatagctggcgttattgctagtttaatattttgcttaatttgtaaagtatttctaaaagtaaaaagccactcaactcgtggcaagagtaaaagtggctgggaatttgattttaaaatcaagttccacaaatttaaataattactaattgtttaaattatgaacttcactctactgtcaaatagattgtagttcttcttgcttttattataccacaaattagaaaaaatattgtttatataaaataaaaaataaaaatttttattaaaaaaatgaaaacttgattataaagcaattaatttataaaatatatataaataagtaggtatttatttacttgaatttcattgtttatataaaaaaaatggaaaaatatgtaataattataggttataataattgtagcaaggataataatcgaaagtgcgaagggtgattattttcatattaaacgccaaattccaaataaggaaggaggtgaaattatatgataggttttttattaagcatactagctggtgttatatcagcttatatttatgacaaaataaaaaatcacccagacgccaataagggtgatttaaaaaaataatattttcacttaacaactgaaaataatcactctttgtaggaataaattatttccttgcttttattataccacaaattggtacagatattcaaaaataatatttttatgatataataaaaatgtagagattttgcagtgagcgatatttgtgataaattgaagtttaacagttgcaatataaggcgttgagggtgtgtgataaatgttatcaattgcactactcatggttcactgcaaatttaagagagttgtatatgtgtaggtattgaaaatactcaacttattttggggttttagattaactatatggaatgtaaatgttgtaagaagtatcattctattttttaatctttctgttttagattaactatatggaatgtaaatttcagtgagaataagctttattgtcgatgtaacactcgttttagattaactatatggaatgtaaatagtacatataatgagtctttaacatcagttatgaaaggttttagattaactatatggaatgtaaatgattgtactttagcgtctgcactagctttgtctatcgttttagattaactatatggaatgtaaattattttacagatgaacaattacagttacttcttgaatgttttatattaactatgtggattcaaaattaaatagaaaaaagaaagcacttacttaaatagtaggtgcttttgttttgctcaaattacttaattataaagttgctaagtacaactttttagaattatacaatataaaaatgcactaaagtgattgattttgctcaagttggtcggttgagtaaaataattagaaaaaaatgttaaaaaactcttgaaaagtgtcgcgatacaatgtataattatattatcgcgatacagaaaagaggtgaaaattattactgatagcagtagagcagattacttcaagcagagacgacagaataaaaaaacttttagtgttctactagatagagagaaagtagagaaaattgaagaacatttaaaaaagcagaacaagactaaaactatttggcttgaagaaaagattaatgaagagctagaaaaagaggaataaaaaataagagacgttctccccgaccaaagattgaacatcccttattgacgtatattatatacactaactatagtatacgtcattccttgaaaaaattcaattaaggagtgtaatagttatgaaaaatttaatagtaaaagagttcaatggaagtcaaatttatacttttatgtggaaagaaaaatcttgttggatagctaatcaaatagttggattattcgattatgctgatgtatctaaaacaatacaggattgcataaaagcagaagactttgagattgaacaagagtatgatgtattgaaaggaaatgaatttaatgattttgtaactactttaaatgtagtcgcaaataatataattagtaataaagctagaagtataactattttttatgaagatggtttatatggatttttacaatacacagacaaacctattggtgtacagtttaggaaatggcttagacgagaagttttaccaagcataagacaaactggtgcatacataactaacaatgctaatcccgaaaaactaagagaaaaagcaagtgagattgagaaattacagttagcttacaatagtacatctatgttaaaagaactattagatggtgcaggctttgacaataaatccaaactattaacagctaaaacattatataagaaagcaggaattgatttaccaatagagataaacgaagaagaacattattttgatacaaagcaaatagcatctaaactgaaaatatattctaagagtaataaaccagcacagttggctgtttgtgaaattattaaaaagattgatttagaagaaaacgaagtcaaaggcgtttgggaaactaatggttcttggactggtactgtaaataaatatacaaagagtgtaatagataaggttagaaattggatagaggaaaataatagacctactaagattgcaggtgaaaagaagaattatcatgtggtttataagattgagtaaatttataagattgtattaaataatttagtttagttttggggggattaatacaatgcatgagaatttacttgatagtatagatattgaaaagagaaaagaagaatttagaattaaacttttgaaaataagagaaacagatatagatatatataataagatagaaagtatagtatataaactttcttagaaaaaattagagaaaaataattaaataaatagataaagcacttggatatttcactgtttcaagtgctttatatggtaaaaaatggtataataaaatataggaattttgcagtgttcgatttttctactcaagtatagtttaacaattggaatacaaggcattgagaaggtttgataagtgttatcaattgcactattacccgctcactgcaaatttgagaaagttatatgtgtgtaagtcttggaaatacacaatttattttggggttttatattaactatatggaatgtaaatctttgtaatggtagtgtatttaagattgaaacatcaagttttatattaactatatggaatgtaaatcaacattagtagttgtctttatacacatagcatcacgttttatattaactatatggaatgtaaatacagctcccaagacatacaacgaatctgtaacatcagtgttttatattaactatgtggtatgtaaaagacttatttacagctttatttgctaaatcagaaggttttatattaactatgtggacttaaaattaaaaataattaaaaaacacttactaatgtaggtgtttttttattgaaaggaagtgattataatgtaaaaattttgaagatatagtataatattcttataaaatataatttagggggatattatgagagaaggaaagagaagaagaggatgtctattttggtttattcttattattttattttctggagttgttggagcaatagcagggaacagtactaataatgaaagcactgaaaaacagaaagaggatttaactaaatatattggtgaagaaggtagtataggagatttaaaattaactgttaatagcatttcaaaagctagtgaaatatcagtagcatctggttatttagcatacactccagatagtggcaaatatggtattataaatttaacaataaaaaatcaaactaaggaaagccaatcttttatgctaaattcattcacattaataggaccagatgattcaaaatatgttccatctttattgattgatgtaggaaataaatatataactatggatactgtaaatcctaatttagatgtaacaggtaatattgcatttgaaattcctaaggatttactagtttctgattgtaaactaaaatatagtggttcagagcaagaatttatattaaaagaaaaataatatatagatttaaaaatatgaagcatttactttaaataagtaagtgcttttttaattaaaaggaggtgataataatgtaaaaattttacttatatagtataattacattataaaattattgtactggggggaatcttatggggttatttggaaagaaaaaagcagatatatgttgtatttgtaatactgagataggagtactgaatattgaagatggttggatatgcaattcttgttttaaagaatattgtgatgcactttctatgactaaagcacctaaaattttaagaaaattagatattgaaaagactatatcatcaactaaaaaaaataatgaacttcaaaaaatatttaatacaactaataatatagaaaactatatagaatttgatgaagataataaaaaatggcttgtgtctaaaaaaagtataaacgataaaaaaactcctatcattcattcttatgaagatatcgtgaaatttgaacttcttgaaaatggtgaaactgtaactaaaggaggaataggaagagctttagcgggaggaattttatttggagaagcaggagctatagttggagggataacaggtaaaaaaacaacaagaaaagttgttgatacatttaaaattaaaataacaattaataatattgataatcctattgagtatatcgaattaattaataaaaaaacaaaaactaattctagtgcttatgagaaagcttacaaagatgcccataaaattttatcaacattatctgctattacacaaagcattaaagagacagacaatataaatactaaatctgtagcagatgagatattaaaatataagaatcttttggatatggaagctattacacaagatgaatttaatactaagaaaaaagaattattgaatttgtaatataataaacacttactaatgtaggtgtttttttatatggaaatttatgaaaggagagtgagaaagtggcaacgatacaaacttcaataaagattttcgacggaatgacacctgcttttaggaatatgactacatctattaatacgacaattaatagccttgaaaggttacaacaaagattgcataatccgcttaacacaggtgggatacaagcatctcaacaaagtttaaacaatattgaaaacatattaaccaggatagaacagaaaattggaagaaatacaaatgaacaagaaaactttaataataagataaagcaaggaagtgaagcaggttctctattagtatctaaactcaaaagtttggctggcatatatattggaataagaggtatagaaagtattacaaaagcagcagatacaattgcaagtacaaaagcacgtttaaatttaatgaatgatggattacagacaacagaacaacttaataagatgatttatttatctgctcaaagtgcaagagctagttatgcagatacggcagcacaagtcgctaaacttggaatattagcaggagatgcttttggaagttcggcagaggtgataaagtttacagaacttatgaataaagcttttgtaattggaggaacatcagcaaatgaagctagtgcggctatgtatcagcttactcaagctatgggtgcagggaaacttcaaggtgatgaatttcgctctataatggaaaatgcacctttattagccactaaaatagctgatgcaatgggaaaaactaaagaccaattaaaggaattgtcaagtagtggagcaataacagcagatgttataagaaatgcactatttaaagcttctgatgagatagaaaagaaattcgcaagtatgccagtcacttttagtcaagcacttactatgatgaaaaatgacgcctacatgatttttgggcaaaccctcggaaagataagtggagcattgcaaagcgttagatttagtgaaattgttgtatctataagaaatgttatgattgcaatatcttcaaacatttacgatacattaaatattataaaaaatattttaaatagtgaattcttttcaaacttagtgcaaggatttacattttgtgcggtagtaataactaaaagcttaggttctattgtaaatactgcattaaatatagttaatatatttgcacaaaattggagtataataaaacctattgtatttggtgtagcttctgtttttatattgtttagaggggttttgctagcgactaaaatagctacaataggtaacgtaattgcgaatgttgctcacgctgcttcctcttcactatcagcacttatgactaatatacaagcagcagcactgatgcgttcgaatggagctactttatcagcaacaatagccacttggggtttaaatgcagctttattagcttgtccaatcacatgggtagtattaggtattctagcatttgtagtagtagtttttgttgcagtagcagcagtaaacaaattcgcaggtacaagtttaactgccttaggagtaattgtgggtgctgtatttgcagcagtggcagcaatacaaaatgttatgatttggttattaaatggctgtatagctgtaaatgaaggcattacaaatggttggaatcaatgtgtatatctaatgaaacaagctattgcaaaaggtgtaatctttataatcgagaaaatggcatctctaaataattctgtaaataatgctggaaatgcacttgggaaagctttcatagatggggcaaatatcgcaatacgaggtgtaaacaaattaattgacctaataaataaaataccagggataaatattggtaaagtaggagaggcaacgtttacgccagttaaggcagataatagttacatcaaacaacagattgatagcttaaacagatgggtaggagacgcaccagagaaagtaaaattggagcgaatgggatacaaagatattggagcagcatttcaaaaaggaaatgcacttggaactaaatggcaaaatgctataactgataaatttaaagatacttttgacattaataagatgctagaagatgcaaagaaaaaattaggattagacgatttgtggaataaacaaaatcctttaaacaaccttggtggatttggtggagatttaggaaaaaatgtaaaggacacggcaggcaatactgcaaagatggcaaagactatggataaaagtcaagaggacttaaaatacttaagagatatagcagagcaagaaacaatcaatcgattcacaggagtaaacattaaaatagatatgaacaatacaaacaacataagtaaagatacagatgttgatggaatagttaatgtcttaactgaaaaactgaacgatgctatggttgtatcagcggaaggaatagtttaggaaggagagtgagaaaatggcttatgatttttacctagatggagtacaactaccaatcgcaccacccaagcttgaagtcaaagtgacaaacaagaacaagacagttgatttgataaatactggagaagtaaacatattaaaaaaagaaggattatctgaaataagttttgaagcagaatttacacataataaactacctttttgtagaggtcaatttagagatgttcaattctttttaagtaagctagaattactaaaaactgattgtaagccatttcaatttattgtatctcgtgagttaggtaacaaggtcttatttaacactaatataaaagtatctcttgaagagtatgctatttcagaagatgcagataatggctcagatacaaaagttgcaataaaattaaagcaatatagagattactcaactaaaaagttagttcttgcccctcctaaaaatgagactggtagacctaatgtaaagatagagccaaaacgagttgattcagtcaatgccacaaacactaaaacatatacagtaaaagcaggggatagcctttggtcaatttgtcagaaacaacttggtaatggttcattatataagaaagtatacgaactaaataaatctatgatggataaggcaaataagggcaaaaacttaagtaaatacactatttataaagggcaggtgttaaaacttggttgatgaattagtgttagcaaatgatagagatgtaagattagtaatagctcattgggaagatttctacgaacctgctgtcattgatggtatcacatgggagatagaaagacgaggtacaccttctaagttagagtttacaatagtcatggatgatatactagagttttgcgaaggaaattctgtaaggctgtattataaaggaataggcatattttatggatatatatttcaaaagaaaagagataaagaaaatcacattaaaattgttgcttacgaccagttgagatattttaagaataaagatacttatgtatatagtaataaaactgcaagtgaacttgtaaaaatcttggctaaagattttaatttaaaatacaatgtcatagaagatactaagtataaaatatctagagtcgaagaaaataaaacactctttgacatgatactaacagcactagatgatactttaagagagaaaaaagaaatgtataccttgtatgatgattttggaagaataacattaaagaatgttgcatcaatgaaactagatactgtcatgaacaatgatgtaattgaggattttgactataattcatcaatagatagtgatacttacacaaagattaaacttgtaagagacaacgaggagtcaggaaaaagggatgtatatattgctcaagactcagctcacatgagaagttggggaatacttcaaatgtttgatacagtagacaaaaacatgagtgaagcagagataaaacaaaagtgtgatatacttctaaaactatataataagaaaactaagtcattaagtttaaaaaatgcacttggagatattagagtgagagcaggttgtttagtacctgtttttttaaatctaggagatattgaattgcaaaattatatgttagttgagaaagtaaaacatacatttgaaaataattcacatttcatggatttgaccttggttgatggagacgaatttgcttcatattcttcaagctcatatagtagtggaaatactaataataaagatgaaaagaaaaatggtcctgcacaaagtattatgaaaaaaaatacaggtaaaaaagttcctgctatatttactgcatattatccaggaaacaatgcaatggaaggtggaaaaacagattgcaatggaaagccacttgatgtaaaatcaagaactgttgctggtccaatgaatcgagaaggagttaagaaaacttggtatactgatgattttctaaataaacatccagtttttgaatatggagataaagtaaaaattatacttcctggtactgcctatgacaacaaagtatatacagttaaagataatggaggaagaatatatgttgaaacaaacggaacatatcatatagatatactattagctaatgctagtgaatgtaaaaaatttggtagaaagaatggctatataattataggtggagatgaagaacaaacatatcaagttgaaggtaataaccaaagtaatacaaataacaattctaaagaagataaattaattagtatagcaaaaagtaaactgggttgtaattatgtgtatggagcagaaggtcctaataattttgattgcagtgggtttactcaatggtgttataaacaaataggtataaaaattcctcgtactgcttctgcacaaagtaaagcaggaaaagcagtagatttaaaagatagaagcaagtggaaagcaggagacttattatgtagaattggtggaggaagtagtaatcatgttgtaatgtacattggaaacaatcaaataattcattcaccacaaacaggagatgtggtaaaaatagagtctgttaattcttatagaaaaggaaaagcatacacacatgtgagaagatttatataagtgaggtggcaatatgagccaagatttattacagataataaaaaaagctgcaatggatgcagtagaaacaagcaacccaatgagggttgtatttggaacaatagaaagtattagtcctctaagagttaagatagaacaaaaactatctattggtgaaatttttctaatacaaacagatacatttaaaagatatacagataaaaaaatgggagataaattagtcttaattcgtatgcaaggagggcaacaatacttgattttagataggatgtgataaagtgttaccaagtgataatttagattatgatattgaagatgtatcaataattaattttgatgtaagacaagagccaagtaagacatttaaacttcatatagaaaagtctaagattgatggtatttgtgatgatgtagaagcattaaaacaaaccatttttttaattttaaatactgaaaggtatgagcatcttatttattctagaaattatggtgttgaattaaatgatttaattggagaacctatttcatatgtaatacccgaacttgaaagaaggataacagaagcactaattcaagatgataggattgaaaatatagataattttgagtttcaaaatataaagggtaaagtacaatgtagattttcagttcatacaaaatatggaaatataaaagcagagaaggtggtgagtgtataattgtttgagttaatgacatttgaaaatataattaaaagaatgttagatagtgtaccagatacttttgataaaagggaaggttctataatatataatgctcttgctcctgttgctatagaacttacagaaacatacattgctatggatgaattactagaccaaacattcgtagatactgctagttattattatttagagaagagatgtaaagaaaggggaataacaccacttgaagccactcatacgattgctaaaggagtttttaacatagatattccacttgattctaggtttaatctaggagaatataactatgtagcaattgagagaatatctgaaaaaacatataaaatgaaatgtgaaactactggacctgtatttgagttaggaaaactaatacctattgaatatatagatggtcttgaaactgctgaactaactgaaatcttgataaatggagaggatgaagagtcagaagatagtttaagacaaagatattatgatagcctaaattcacagagttttggcgggaatatacaaaactatagggatgaagttaacaaaatacaagatgttggaggagttaaagtttatccaacttgggatggaggtgggactgttaagttagtaataattaactctaattttaaagtgccaagtgaagaattagtaaacttagttcaagaagaaattgacccaattggacaccaaggagaaggcttaggattagcaccgattggacaccgagtcacagttgaaggagttacaagtacaactataaacatatcagcagaaataacatacaaaaatggctacacttgggagaatataaaatcaattgcagaagaagcaatagacgactatttaaatgaacttaacatgagttgggaagatgaagaaaacttaatagtccgtatatctcaaattgaaactagattacttagtattgatggagtattagacattgcaaatacaatgataaatgatgttaaatctaatctaacaatagatagtaacagcatagtagtgagaggtgaggtagttggataaagagattaatctaataaattacttgccacaaattctacaagataaagaagaatatataaaagtatttaatgtagaaaataaagaaataaaaacactacatgataaattaaaggacctatcaaatgaccagtttttagaggacctaactataagtggtataaaaagatgggaaaagataatgtctataactcctaaaagtaatgagagtttagaagatagaaggtttaggatttttagtaaatatataagtaaattaccttactcagagagatttttaaggaactggctagataatgtagttggagaaggcaattatgaattaactattaataatgctacttataacatacaccttgagagtgatgctagaaatcaagattggtttgaggaagttcattcttttgtaagtaatattaagccatgtaatatgactttagattacactagagtgcttataagcaaagacaattatatgaattttggtataacaaccctaatgggtcaagaaataactatatacccttggagtccaccagatatagaaacttatggagaaattgatgtattaactggcaatggagttggataccaagagataacaatattttaggaggtgatatattggctatagataaaagttattacactataattacagatgtaggaaaagcaaagatagcaaatgcaagtgtcacaggtaataaagtagggtttgtaaaaattcaacttggtgatggtggaggaagtgagtatactcctactgaaagtcagacagaacttaaaaatgtggtatgggaaggcaacatcggaaatacaaccacagatgaaactgcgccaaactgcataatattagagagtttaataccatcaagtgtaggtggatttatgataagagaaataggatatttagatgatgaaaataatctaattgcaatctctaaatataaagaatgttataaaccttctatagaacaaggagcagttgttgatatgaaggttaaaactgtgcttattgtatctaatataaataatatagaacttaaaattgaccctacaataatttttgctacgctcaaagatatacaggatttagatgctaaaataagcaatgtaaacactaaaattgatacaactaaaacagagttaacaagcaacatagaaactgctaagacagagttaaacactagaattgacacagaaaatgagaaacaaaatattaaaattgaccagctaatagcaggtggttcaaatgttgcatctactcaaacaataacaattgatgattggatagataatcaagaaggtggattcaaagcaactgtaacacatggtttattaacacagagaataactgtaagtattatagatgctactacaaaagataatgtagtacccgatttcacaattatagacgataattctattgaggttagaagtggagtaaaagttgagttaaatgtttatgtgattaatgggaatgcagagactcattttattaatgcgactgtagatgataatagagtgtctgaaatgactacttattcatcaaaaaagatacatgaagaaattggtaaggtagcagagcaactgacaggaattaatagtaatattatatcgactgtaaataacgacatactacctatatagaaaggagcgtgaaaaaatggcgttatcaatgagttattttaatttacctgacaaaagaaaatatactaaaaatcttgcatttaatccatttgcaggtggaaggcaaaattttgagtggactggtggtgaccatggactaaatggtgagtttaaagaaacttgcttaagttgcacttacaatggttcaacattaaattggggttcaggaaatgtttgggtcttgggggaatatggtcaatatacatttacttataattgtgaatcaatgcatgtggatacacaacaaaaatttccgtatacttctaatagaataataactataaaaggtagacctgtaatatctggttcagatacttcacttgggaataaaagaaaaggatttagtgtagattttactgtaagtgatgatactccaaatgttaatttaatagtacgtgcttatcttgatgataaattaatacaaaacattactcctgttgtacaaaattcaactttaacagcaacagtaacagatagtcaactaaactctttatccgtagatggaaatcacaaactaaaaatacaattaaatgatggatatgataattttgatagaatttttacttttaaaaaaatagaaaagggaattgatatatcaacatcattagtaactgatagccaagctaagtttactgtaacaaaaatatacagtgaattgacaaaaatagagtgttatttagatgaaacattaaaagagacttttactacagacttgtattcagaaaagactataaactatgaacttatagacaatgcaatacacacattaaaaatagttgtaactgatgcagaaaatgttgtagaagaaaaagttataagtataagtaagaatataatgccattgcaacctgatgcaacattacaagatatatcaactaagttaacagagattgggcaaggcgttagaaatggtaaaacaagcattataaatactttagcattaaagaatatagatgcaagtttaaataatacactcgttgagttatcagagaaaattaagggaggttttgatagtggagacgctagtttacaagatttgatgaatcaattaacacaagctaataatactatatcgcagttaaatactaagtataaagttgctagtggtacagttacttcttttgcggatagtactaaaattgcttatccatatctaaccgacaatgttactaaacctggttcttggattaaagttagtaatttaggctttaaacctaatattttctttgctgattttgattactatgatgctgaatataaaaataattataaacttttccttttcgcttgtaatggtgttgccacacaaagaggtgttgatttttcaagtgttacatcttttatcagaaaaagtggtgatgagtattttcatgctaatggatggctatatagtaactcagagggggatgtctattttaataatactggcgttcagattccagcttataactttgattcaactcaaaaacatacttataaatggtatgctattaaatttatttaaaaggaggaaaaaacatgaatgttccaaaccgaataatatatgaccaaacaggtagaacaatctttgaaacaggcgaatcctgtggagatgtattgccacattatacaataacggaattgcattatatagatattgaatatggaagtatagattatacaaggaatagagttataggtataaatatagaaacaaaagaaccgattttagaagaaataccagtatatataacagatgaggaaaagagaatacaagagttagaaaatcaattattaattgcagaaaatgagaaagtaggaggattattataatgaatataaataatgttgtagtaagaatattagcagaaagaatattaagtaagggattaaatcctctaaaaaatagagaatttcagttagatgacgtgactaacacagagtacagaaaagctgtagaggattatattataaaaaatagtggagtagtagaaggagcagaaccaactatatagagggttctttttttattgaaagaaggtgactaaatgacttttaaagagttggttaataaagttagaaatcttgtattagaagcaaagaatgtaactatagaagatacagaaagtaaatttacaagtgaaaatgtagaaggagcattgaaagaatgtatagatagagcagatgaggcttttcaagaagccgatagtggaaaaacacttttatcaactgctatcggctctcctactacatcagaacaaacatttcaagattatgcgaactatattacaggatttaagagcaatataagcaatttagaaactcaattgaaaagcaaatattctattagatatggtcctattgatggatatgatggtaatcctttttctgctaattttggcaagagtgcaagttaccttattgtctatgtttactttagaagaagtgtatattattataatcccagtggtagttctttaggaagtaatacaggaggttctgaacgtgcatggattactataaacagcaataaaactggtttttcagttcattcatatgatactagttatgagtcatatccttttacaggttattatattgcttgtttcgcataataaattatattattaaaactaggaggatgtatggaagaaattagcataaatctactatgtgcagtagcaggagttgtaatatcctacttagcatttagaaataactcaaacagaaagatacaagatgaaacagaaacaactacaaaattagaacaacaaataacttttttatgtgagaatgtaagagatataaagcatgatgtagcaaagtttaatactagtttcttagatattagtgaacgagttgcaaaaatagaagcaagtacaaaacaagcacatcttagaattgatgaaattgtaaatagaattggaggaaaataagagatggataatttaataagttttataccagagcagttgctaattttagtagctgctctctctattataggtaaaggttgtaaaaaatataaacaattagataataaatacattccagtagtgttactgatacttggaataggtttctcaatatggatgctaggattaaatcctgttgcagtcttacaaggtgtaatttgttggggagttgcaataggtataaatcaaacttacaaacagttgaaggatggtgaaaagtaatgaaattaacaaaaatattattactcacaaaaatttaaaaaatttcattaaatagagtatacttttatagctaataagtatataataatagtacagaactcgtaaagcatttatatgctcaaatatacgggacattgatttttgaaggaacccgccaagcttcttttatagctcaaataggcgggacagataaatttacccactaatattaattggtgggttttattatataaaagtatatctatgaaaaggtgaaaacaatggttgaagtaaaagaagaaaaaacatttgatgaacaaatagatattttaaaaagtagaggattaataataaatgataaagaagatgctaaatttgtattaagtaatgtcaattattataggtttacagcatatcttctaagttttaagaatgatgatggctcatataaagaaggaactacgtttgaagaagtttatgatatatataggtttaataaggaatttaggatattattaacagatttgttagggagcatagaaatagcatttaggacatacattgcatatacattagcaattaaacatggtgcttgtggatatctagaaagggagagtttcaaagatgaaaaattctatattaattttttgacagcattagagagagaaaaaagtaataattcagataagctttttattatacaccataaagaaaaatatgaaggaaaacttcccatttgggttgcaacggaaataatgacttttggtatgttgtcaaaattatattcaaacatgttgccagaagatactagatacataaaaaataatttgtgtagagtgaatactttattagttaaatcttggttacaatcattaacacaggtcagaaatcaatgcgctcattatggtagaatatataataataatttccgtattataacaataaaaaacgaatataaaaagtataacttggataataaaaagatattttcttatatacttgctatgaagcatttgactatggataaattaatttggaatagtttttttataaaacttcaaaagttaattaatgattataataattctatagacttaaagcttattggttttcctaataattggatagagatattggctaaataaaatagttactttaagaagtttataaacacttactatatgtaagtgtttttttattgaaaagaaggaggaaaataaataatgaaaatatgtattacagtaggacacagtattttaaaaagtggtgcatgcacttctgctgatggagtagttaacgaataccaatacaataaatctcttgcaccagtattagcagatacatttagaaaagagggtcataaggcagatgtaataatatgtcctgaaaagcagtttaaaactaaagcagaagaaaagacttataaaatacctagagttaatagtggaggatatgatttacttatagaactacatctaaatgcaagtgatggtcaaggaaaaggttcagaagttctatattatagtaataaaggtttagagtatgcaactagaatatgtaataagctaggtacagtatttagaaatagaagagctaaattagataaaggattatatatcttaaatagttcaaatcctacagcagtattaattgaaagtttcttctgtgataataaagaagattatgagaaagctaagaaactaggtcatgaaggtattgctaagttaattgtagaaggtgtattaaataaaaatataaataatgagggagttaaacagatgtacaaacatacaattgtttatgatggagaagttgacaaaatctctgcaactgtagttggttggggttataatgatgggaaaatactgatatgtgatataaaagattacgtgccaggtcagacgcaaaatctttatgtcattggtggtgcagcatgtgagaagattggttctatgactaaagaaaaatttactatgataaagggtaatgatagatttgatacactttataaggcattagattttattaatagatagattatataaaatattttagtatttcttgaaaatcataagtatggtaatatttagataaatattatttattattaataggtatggggggagattatgatatttaagaagtatataaaatcattactgatagttgttagtgttacattgataatgaacaaatcaatattatttgtaaatgcattagatttagagagtaacaataacataaaatcttataaaagaaagaatgtaaaggaaattgatataagcaataaatttgttgatgaatcctttagaagagatattgttgaaaaggtattagataatagggatgatccattaacaaatgaagttgcatcaaaagataactataaaatatatgaaagtgatttaaataaaattgagagttgcttagagttagatttacataaaaatccagatgtttctaatccaaacaaaatagataatttagatgggatagaaaattttagaaatctagaaaagcttgattgtagttcaaataatctagaaagtgtagatttaagtaaaaatataaaattaaaatatctagatattagtggaaataaaatattaaacattgatttaaaaaacaataatcttattaatgaattacattgtgatgcaaataaattatcaaatttagaccttaaaaataataaaaatttggtaagtttattttttactagtaatgaattaacagagatagatttaagtaataatgtgaacttagaaaatttacaatttcttaataataatttaaaaagtatagatttaagtcataataaaaagttgaaatctctaaattgtactaacaataaacttaaatcccttgatttaagtaataatgtttttttgaaaaatttaagttgttcaggtaataacctgagtaaattaaatataaaaggacttacaagtcttgagtatttgggatgtgctaagaataaattacaagatttagatgtatctacaaatataaaattagattctttactttgtgggaaaaatagtttaacaaaaatagatataagtaaaaataaagaattaaattcactggaatgtagtggtcaatatatagaaaaaagcattataaaaaatggtgaaaatatagttgtagatataggaattgaaaattcgaaattaaaggaattatatccacaaaattataatatttcaacaggttttctaacatgggaaaatctttctgactttccaaatagcataagttatagtttggaatatgaatatggtccagtaaatgatacagagactatggatgtaaatatatcaatagataaattagtgaaatgtagaatcagatatatagattatgatggaagtataattaatgaaaaagaaatatcagataattctagtataaatgaaattcaaattaatcctcaaagagaaaactatgagtttagtggttggaggaacaataaagatgaaaaaatatatacatcagagcaggtaagtaaattagtttttgatgatagtactgattttatagcaacttataaaagaaaatcaacaggatcaagtggttcttctggtggaacttcaagtaaagaagattttaatatagcaccatctaaggaaaaaataacaggtgcagacagaaatgaaacatcagtgaaaataagtcaaaaaggatggaataaagctgataatatagtgttaataaatgactctagcatatcggatgctttatcagcaacaccatttgctaagtctaaagatgcaccaatattacttactaaaaataataatttaaataaattaacagaaaaagaaataaatagattagaagcaaaaaatgtgtacatagtgggtggattaaagtctgttgatgaaaaagtagtgtctgatttaaagaaaaaaggattaaatgtaattagaatatctggaaatgatagatatgaaacatcaataaaacttgcaaaagaattagacaaaaattctaacctgtcaaaagtagtagtggtaaatggagaaaagggactagctgatgcagtaagtatgggagctatatcagcaaaagaggaaatgccaattcttcttactaatcaaaatgatgatatgaaagatataaaagacttaatagctaataaaaacatatcaaaatcatatgtaataggtggagaatctttatttaataataaagaagtgaataatacattaccatctgtaactaaaatagcaggttctgatagaacagaaactaactcaaaagtaataagtcatttctatagcaaagatacacttaatgacttatatgtagctaagaatggaatgaataaacaagacgatttagtagatgccttatcagtaggagtgcttgcaggtaaaactgaatctccagtagtattagttggaaatggattagatgatagccaaaaagagttaatcaagaataaaaagtttaaaaatataactcaaattggtggaaatggaaatgaaaaagcatttaatgaagtagaaaacttagttaaatagattgaaaggtagtaactggaaatagttactacctccttttttattcattttcagttttttcaataattatttttccatcctcaaaagtaacaagaacatccctttcatcaggagagatattcatctctttaatccatgacattggaagtatcaatctgggtgtaaaagagcctttgccacttttattaaatccaattctaagttttctttgctccaataatatcattcctttctactattaataaatgccagcaataataaagtaaataccaaagcaataagagctttaaaagtaaaacttattattatattaataatatttaaaactatagtgataccaagaataatcatacaaattctataaaatttattattcatattaaattagaaaatgtgttataatattagaaagaagctacctagaaggaaggtattttcctcctaggattgaaacttataattctttaatcaatcttagtattgcgagtactagattaattaaaactaatgtgaaagagaaagcatttttaattttattaaatttgttttctcttttattttttcttctttctaatctccccactttcttacctcctttctatatttatattatatcatcacgtgacgtgaaagtcaataaatattacatatttttcaataaagttatattgataaactatattttttacaaataaaaataaatggtgacaaaaccaaacttgccaccattttgccaccgaaaataaataatagaataaatttaaattaaacataataaaacataaacaacaaaactgaccttaataaaacattgaaataccaacacttgtaaaaaataacaacaataaacaaataacctagaataatattacaacttaagtaaataataattttgaataataatttacggaggtattcatatgtttaaacacgataaagcattattaaaagaagtaaaagtagaaagaccaaatcctcaatatgctgttttaatgcaagaacagttgggtggtgcaaatggagagttaaaagcagctatgcaatacttgtcccaaagttttagaataaaagaccctcaaataaaagatttatttcttgatatagcagcagaagagcttagccatatggaaatggtagcacaaactataaatttattaaatggacatgatgttgattataatgcagttaatacaggcgaaatagaaacacatgtattaactggtctatcaccagtcttaataaactcatcaggagctccttggactgctaattatgttacagttacaggggatttagtagctgacttactttcaaatatagcttctgaacaaagagctaaggtagtttatgagtacttgtatagacaaatagatgataaatatgtaaaagaaacaatagatttcttacttaacagagaagaagcacataatgctctatttagagatgctttaaataaagttaaagatacaggttcaaatagagattttggagttacagaagattctagattatatttcgatttgtctactccagggccaaatcacaatactaagatagatattaatcctccttcttttgaaaaacctttaaaaaaataatttgatattttttatgttgttttgttttagtagttataaaaattatttactagaagaattaattatatgaaaaattaaatatgtatagttaaaaatgggtatacacttattataagtgtatatctatttgtttattgcaaaacatataataaaataacaaatgaggtggtattttggacagtaatagaaaacctaataatctaataaatgaaaaatctccatatcttttacagcatgcttataatcctataaactggtatagttggaatgatgaggcttttaaaaaagcaaaagaagaggataaaccaatatttttaagtgtaggatattcaacatgtcattggtgtcatgttatggaaaaagaatcttttgaagatgaagaagttgctgaaataatgaatagaaactttgtggcaataaaagtagataaagaggaaagacctgatgtagatagcgtgtatatgacagtttgccaagctatgacaggtagtggtggatggccaatgaccataataatgacaccagataaaaaacctttttttgcgggaacatatttcccaaaatattcaaggtataatagacctggagttatagatttattaaagaatgtatctgaaaaatggaatacaagtagggatatattaataaaatctggagatgaaataatagaagctcttaaggatgattttggtgtaaaaaatactgagggtgatttatcaaaagagatgttgagttcatcagttagagtatttaaggccatttatgatgaaaagtatggtggttttggtaatgctcctaaatttccaagtcctcagaatcttatgtttttaatgaaatattatagcatagaaaaagataaagatgtgttaaaaatggtggaaaaaactttagatggaatgtatagaggaggcttgtttgatcatattggatttgggttttcaagatactctactgataaaaagtggttggctcctcattttgaaaaaatgctatatgataatgctatgcttactatagcttttttagatgcatataaaataacaaagaaagagttatataaagaaattgctataaaaactatagattatgtagttagagagatgaaggataaagaaggtgggttttattcagcacaggatgctgatagtgaaggtgaagaaggtaaattttatacatttaatcctcttgagataattgaagttttgggtgaagaagatggaactttctttaataattattttgatataactagtagtggaaattttgaaggtaaaagtattcctaatcttataaaaaataaagaatatgaaagacataatgaaaagatagctgaccttagtaaaaaggtatttgaatatagaaaagaaagaacatctttgcataaagatgacaagatacttacatcatggaatgcattgatgatagttgctttaacaaaggcatatagtactttaaaaaatgacatatatttagagtattcaaataagtgtcttaactttataaataataatcttgtaaatgagtcaggtagattattagctagatatagagatggaagttccgactatttagcatatttagatgattatgcttttttaatctgggcgtatatagagctttatgagtcaacatttaatatgaaatatttagaaaaggctttaaatttgaatgaaagctgtatcaaccttttttgggattatgaaaaaagtggattttatatatatggtaaagatagtgaaaatttaatagcaagaccaaaagatttgtatgatggagctattccatcaggaaattctgttcaattatacaatcttataagacttgcgaaaattactggagataatagacttgaagaaatgtcatataaacaattaaaactgtatgtggataatgtaaagagttctccaactggctacagcttttatatgctttcattgatgtttgaactttattctactaaggaaattatatgtatttttaaggaagattctgatttaattgcatttaaagaattgataagtgaaaattttataccaaatgcaacttttttagcaaagaaatacaatgaagaaaacactattataggttttttaaataactatagattgaaggatgataagactagttattacgtgtgtcaaagtaatagttgtagtcaaccaattaatgatttacaaaaattaaaagatatgattttaggagtagaataatcataatagcgaaaaaggagatgctttaaaataaaagtctaatcatctcctttttttgtacaaaaaacagaaaaagagttcctaagaacacctaatctatgtaatgattgttttgttaaaaaataaaaatgacattatagttatataaaatattgtactataaaaaagtggtattatagatgcgatagtattaatcgtttttatttaccctatttcttctttttgcaaattcttcaagtgcttcagatttaattttatctatttcttcatattccataaaattagcatcttcttcaaagccatcttgttcttcaccattaaaacgatacattttttttagtaaactccataaggtctctaattcatctttggtaaattcgtgaaatacatctgccataaagtttattccagtcctactacatgttaccataaccttttttcctaagtctgtaactttaacattaattgctctcttatcatgaggacttggaattacatcaacatatccatttttttcaagattagcaactagtctatttatattttgtttacttgtacccatttttcttgcaatattatttaatgttgtttcttcctctggtaaatgaagaattgataaaatagtcatatactgtcttgaagtaagtataccaaaatatttatctccttctatttgtattttgtttgtaagggtaaaaagagttgcatatgtttgattcattaaaaagagctcttttagttcatttgaataatccatgaaatatatctcctttatttttagaagttgttttgtcgaaaacagaatatcatgaattaattctaatgtcaatatggtgtcaaaatatattaaagtattacttttttatgtaactattaattaaattattgtataattgtatgtaaaaacttctatgtaccaatgataatttctatgaggaattaataattcttaaattttttagaaagattttgacttgaaaatacttgtaatataatatataaattaatatactgaataaaatcaatctggagggataattatgaagtgtacaaactttactttcaaaggagaggaaggtttagatatatatacatataaatgggaagatgaaaatataaaaaaaccaaaggcagttatccaaattgcacatggaatggctgaaactgcacaaaggtatgagacttttgccaaggtacttactaaaaatggttatatagtatatatcaatgaccatagaggtcatggaaaaactgcaaagataatagaaaatgttggacatttagctgaaaaagaaggatttagatgtcttgtagaggacatgtatactttaacaaatattataaagaaagaaaatgaagatttgccaatttatctatttggacacagcatgggttcatttgcaagtcaaagatatataatggattacagtaataatttatctggtcttatactatgtggttcaaatggaaagcaaggaatcattctaaatcttgctcatctgataatcaatcgtgagattaaaaagtatggaagacgttctaaaagtaataaaataaataatttgattaaaaaatagctatgcacacttgtgactttagtcatgagttagtagctaaaatagtcagcatatagggaaacctatatgtagagataggatagaacctatccaatactacttgaattgctggaaacctctaaagctaaccaaactaaaacataaggatgaaataaacctaagtgtgaaagttacgaaagtagaaaaaattggttagatggtataaggttaaaccctaagtactttaaaatgggcaatcagcaggtaagctccgaataggagaaacttcaacgactattcctcttgagggaagtacactacaagttattggtagtggaagtgggtagaccttagcggataatgccgaaggataagatatagtctgtgcttacatgaaagtgtaagaagttcataagagaactgcataggtagtagcgaacttatgtgaacgacaacctcaaaaatgataaaagttaagaacttacggttcttatatatgttatttaaaaataaatataaaaaaccttcaaaatacttgttttaagtaattgcatattttaatattatgataggtgatgaaaaatggaagttactcatggtagaggatatgcatataatatgtcaaatatagacatccagtattatggggagacatctttggaatcatagttatttcgttgctactgtatcagaaaatacagaggagcagataagaaaatatattaataatcagaaaaaacaagtaaagtgaggtggcagtagtggaaaaagcttataagtttagaatgtatccaaataaaaaacaacaagagttaattaacaaaacttttggatgttgtagatttgtatataataagtatcttgctaaaagaatagaagtttataaaaacgataaagaaacttttacttataaacagtgtagttctgatttgaccaatttaaaaaaagaattaaagtggcttaaagaacctgacaaattttcactacaaaacgccttaaaagatttagaaaacgcatatgaaaaattctttaaaaaaaggcacgatttcctaaatttaaatcaaagaaaactaatagattttcatataaaactaactttacaaatggaaacattatgtattgtggtcaacatataaaactacctaaacttggtatggttaagataagggataaacaagtacctcaagggagaatacttaatgctactatatctaaagaaccaagtggtagatattatgtatcattatgctgtactgatgtagatattgaagcatttgaaaatactaataatcatataggtttagatttaggaattaaagaattttgtatctcaagttgtggagaatttatagaaaatcctaagtatcttaagaagtcattgaacaaacttgctaaattacaaagagaattatcgagaaaaacaatcggtagtttaaatagaaataaagcaagattaaaagttgcaagacttcaagaacatatagctaatcaaagaaatgattttctacaaaaactatctactaaattaataaaagagaacgatattatttgcatagaagatttacaagtaaagaatatgattagaaatcgtaaactatctcgcttaatttctgatgtgtcatggtcagagtttattcgtcaattagaatacaaggctaattggcatggtagacaaattgtaaaggtaggtaaattctttgcaagttcacaaatatgcaataaatgtgggtataaaaacgaggaagtgaaggacttaaatataagagaatggatttgtcctagttgtaatgaaattcacgatagagatataaatgcaagtataaatatattaaaagagggattaagactaataacaattcaaaataaataacttatgtaagaaccgtaggaactacggggatagcctgtggagaattagtaagacatattttagtatgcaaaattctgtgaagcaggaaccctgtgactttagtcatgggaggttcagatttggtggcaaaataataagaagaaatgaaaagactaagtttgactggttaagtagagataaagaacaagttgaaaaatatataaatgacccattttgtggagtagtgtgtagttgtggctttttttatgatttagttcaagggttaaaagaaattgaggataaagaaaacttaaaaaaagtgccacttgatatacctatttacataatatctggagataaagaccccataggaaaaaatggtaaaggagtcttaagactaagggatagatatataaaattaggagtaaaagatgtaacttgcaaactttacaaagatggaaggcatgaattgttgaatgaaataaatagagaagaagtttttgaggatataatttgttggttaaacaataaaatagaaatattgtaataaaaaaatataatgatatatttgctttaaatttatttatatataatatttgaaaagtggattatgtatatgcaaagtagaaaagagagagcctagaagtgattttttgctataatgccatttattgaataggtgggtgttattataaataaattattaacactcagtattattatcattgtatatggaatttattttatttaaaattccttgaaagtttaaatatagtaagttgtagtaaagagaaaatctaaatatttaaatgctatttaatgtgaatctattaattaggttatacttaaacttaattaatagattttatatttcaagccaatgagatagggttttagattaaaatataaccaatggttaaattacagacattttgttaactttccctcgatttactagtaaatattttttttatatacttaaattacaacagatgtactagggaggtatatatgcaaattaaaataggtaaagtcatacagcgtcttagaaaagaacgaaatttaactcaagaacaattagcaaagtttataggtgtgtcaacaccagcagtatctaagtgggagagtggaaattcttacccagatatagaattattgcctttattagcagacttttttaatgtgtctattgataagcttttaaattacaagattgatttaagtgaagaaaaagtaatgaaaatttataaagaattagaatcaggctttgctagaattgaaattgatttatcaacagaagaaccaaaagaagaatttagacaagacttagaatctgtaaaaaagctttctaatatgtatatagagaagtatcctaaaagctatttattgaagctaaggatatgttcgctgtatcagatgtattcatataaatttggtaagagtgaacttaatgacagagtaaaagaaacaacgaatattcttgaagatatagtgagaaatacagatgatatccaaataaaagaaacagctcttattatattatcaaacgcatattgtatgttggaagattatgaaaaggcagagttgtatttaaatatgatacataagtcaataggggatacaagtgttaatttagctatgatatatttaaagcaaaatagacttgaagaagcagaaatattgcttcaaaataaattgtttagtaatatatttaatataagcatggattgtaagggaataattaatgtatacaaaaatcaatacaaggaattaaagaaaaaattggagaatagaaattttaataaaaatgcaattgagagagaaatggagtatataaaaaataagttgctgtggtatgcaaatctttctttagaaataaaaaaaatgctcagtgaagataaaggtgcattttttagtatgtatgtggattatatggaattatctctaatttttttattttttaacatgaaagaagaagcaaaaaaagccttatatagtctaaaagaaatattagaaaaatatcctatacatgaaagtttggatgtaagtcaaatgagattttttgataaggtagagtctaaaaatttatatacttttaatatatatacaaacttgttaattgtacttaatgatgacagttataatgagcttagagaagaaccaatttttaaggatgtaattgaaaagattttagatatggaaaaaatgttgaaaaataaagaataagtaaaaatttaatataggacttaaagattaatcaaattaaaagaaagtgtttcaaaataaaaatttgaatcaccttttttgttggtcttaaaccgttatttagaaaaatagaggtttcaaaatagaaatctgaattatctgtattattacacaaaaatagaaacctaaatttataaaaatagaataaagtttgttatataaaatgtaattttgtctataaaatctcacatgttttcttaactttaagcgtgaaaaagaggatgtatcatgaattttttagttcatgatgcatccttatttgtatgaaatccaatatatctttattatttaaacaatggaaaagagtcttatttctattttgagacatctcttttatttaattatgaagttttatacagttcaataaataggaattatatttagaaactcatgacattatttcttagatagtgattaaatttatcatattccattttagataacttttctgggtaagacattacaatcaggttatgcccattgaatttttcatggtatggtggatgaatgtgttcataattatttgtcttatattttactctttcatagaacgccttgcgataaattgaaatctcatcaattggaaggtcaatttctaaaataatagtttttcctttcttatttaaaagctctaacgctctttgtccatatctattattgcgcatttctggaaaaatgcagaaatgttctacatagataaagttatctgtttcccaacataaaattatgccgacaaactggtttttatcataaattaaattgaattgatattctttatttttcaaaatttctgtttgcaaataagattttctttgttcatgaaatgggaaactaattttatataattccatagccttgtaatataatttattttcactggttcttaaccgttcaaatttcactttactcctcctaatcacgaaaattccaatttatttatgagttcattttaccatagtcagtatttgcatacaatgtgttttaagttgagtgtcatttctttcttttatttatgcttatatctcatagactaagagataattgcttaagacataactaaaaactattatattaagctttgataatctaaaaacagtatatttatggacttttctaggtctaaaagtaatcttaataattttagaagttacaaaaaagttacataaatttggaaagctataatatacatatataatataaggttaaaactgtaatgaataatattaatttaaaatttgaacatggaaggagattattatggagaaaagagaaaagaggataataatatcatctttattaagtgtatcaattttaatgggtttggtaagtatatattctatattaaataaagaagacataattttaactgttaagggtcaagagcaaaaagtatcttcctttaagaaaacagttgaggaacttttggatgaacagggtgtaaagtataattctgaagataagattaatccaagtttagatacagaactaaaagatgatatgaaaataaaagttgttaaggtaactaaaagtaaaaaagaagagattgaaaaaattccatttgatacaaagcatgtaaatgatagtaatttgttaaaaggaaaatctaaagtttatcaagaaggtcaagaaggagaaaaaaaactagtctataatttaacttaccatgatggaaaattagtcaaaaaagtcttatcaaaagaagtaatatctaaggagccaactacaaaaattataaaatatggaactaaagaaaaagtactaatagcatcaagaggagcaaatataagaggaggcaaacatatgaaagtggttgccactgcatatgcaggagatacaataacatctactggtacaactccaagatggggtgttattgcagttgacccacgtgtaataccatatggaacaaaagtatatatacctaaactgggtatgacttttgtagcagaagattgtggaggtgcaattaaaggtaatagaatagacatttttatgaacagtgaaggaaaagcttcaaattggggaaggaaaagtatagatatatatctacattaaattagtgaatagaataactttacttgaaggacaaaaaagtataaaatatgaattaactaaactgttagattattcttaaaacataaaaatatatctaaggggggataagatgaaaatagtctgcttaggagacagtttaacgtatggatttggagtatcacgaagtaattcatggacaaacattgtaaatgaagagactcgattagaaatagtaaataagggtataaatggtgatacaacaagtggtatgttagctaggtttaatgaagatgttgtaaaaaactctcctgatatagtttttataatgggtggcactaatgattttattgctggtgcgggaaatgaaattattaattctaatataatggctatggtgcatcagtcatattcaaaaaatattatacctataataggtataccattaaaaccagatattccaaatgttagggaagattggagttgttttactgattttaatatagtatctcaaaacttagaatcatatagttattggataaaaaaattttgtatgacatttaatactaatttcgcagatttttattcagaatataataaaaatatggaactagaaggatataaaaaattatattttgatgggttacatccaaccaaagagggtcatagaataatggcagacatttttattaattcaattaataagtatatagaagagttatagattacattaaaatgcttgtttatgcgtcagttgcaataaatacatacagtagagaggggtttattatggattatactaaaacttatgaagagtggataaagggttcatattttgatgaagatacaaagctagagttggagaatataaaaaataatgaaaaagaaatagaggatagattctataaggatttagaatttgggactgcgggtcttagaggaataattgaagcaggaacgaatagaataaataagtacacagttagaagagctacttttggattggcaaactatatattagaaaacacaacaaaagaagaaacaagtagaggagtagtaatagctcatgataatagacacaagtctagacaattctgtatagaatctgcaaatactttggcagcatgtggtataaaagcatatatatttgatagtttgagaactactccagaattatcttttgctgttagaagcttaaatgcaatcgctggtatagtcataacagcaagccataatcctccagaatataatggatataaggtatactgggaagatggagcacaagttatgccagagattgcaaatgcaataacagagaaagtaaatagtatacatgattatagtacaataccaaccttaacggaagctaataaaaatttggtagttttgttggacgaatcacaagatactaaatttatagaagcagtaaaaagccaaattataagaaaagatttagttaaaaatgtaggtaaaagctttaagatagtttatacacctctttgtggaacagggaatgttccaataagaagagcattgaaagaagttggttttgaaaatataattgtagttccagaagaagaaaatccagacccaaattttgcagggcttgattatccaaatccagaagagaaaaaagctttaaatagaggtatattactcgcaaaagaaaaaggagcagaccttgtaatagcaactgacccagattgtgatagagtaggtgtagcagtaaaaactactacaggtgagtatgctttacttacaggaaatcaaattggtggtatgctgacacattatataatagaaggattaaaagaaaataacaaattaaaagaaaatcctacaataataaaaaccatagttacatcagaatttggagcagatatagctaaagcaaataatgttgatgtattaaatgttcttacaggttttaaatttattggtgaaaaaataaaattatttgaacaaaataaaaatagaagttatgtatttggatatgaagaaagttatggttacttagttgggactcatgctagagataaagatggtgtagtttcttcattgttaatatctgaaatggcagcattttactattcaaaaggtataagtttatatgatggtttaatagaactttataaaaagtatggatttttcaaagaacagactatatctttgactttaaaaggtatagaaggtgtagaaaagataaaagaaataatatcttattttagagaaaatcaaattgattatataaatagtattaaagtagttgataaaaaagattataaaaatggtatagataatcttcctaaatctaatgttttaaaatactttttggaagatgaatcttgggtagctataagaccatctggaacagaaccaaaacttaaattttacatagctgtaaaaggagctagtgatattgaagcagataaaaagattcaaggtttgaaaaagtatatagatgacatggtcgaaaaattaaaataaaatattattattttataagataattttgtaataatatttatttagctgaaaattataatttactttcattgagtagaatatggaaatgttagtagaattgttattttcagcttttatttgtgttatttttacttaaataattatattatagaatgaatctgagtataattaatattgtataatgaaattaatttgatagaaaaggggatatttatgtttggtatagataagaaattgattgaatatataattgcaaaatccaattacagtgaattaagttcaaagtcagcagaagtatctttcttcttaatgttgtccatatttccttttttaatatttacaataagttctatagcttatataccgattcttcatttaaataagtatatagctttgtttagaaatatgatgccagaaggtgcttttgctgtgttatcttcaatcatagtttctgcaatagacaatagaaacctgaaatttttagcagtcagttttgtacttactatgtggacattttcaagagcagtaaaagctcttattaaaggaatgaatagagcctataaagttaaagaaactaggtctttttttaaaattttatctatatcatttttatttacaataatgcttttggtccttatttttttatctatgatatttttagtttacggggaaaaaataggttattttatttttaatcttgtaggattggatgagatatttataaaaatatgggatattctaagatacactgtaggtataataacaataatagtgatatttacacttttatataaatacactccaaataaaaagttaactattaaagaatctgcgccaggtgctatttttgctacttttgcttggtttttagtatcatttttatattcttattatacaaattactatgctaactatgaagtaatctatggaagtatagctgaaataattgtacttatgacctggatgtattttagtagttggtctatcgttattggctatgaggtaaattcaagattgtattttagaaagataagacatgaaatgttaaagtaaagtatttaaaataaaagagagtatttagtattataaatgtaattgaattaataaagaaatattgacatttaagttaaaaagtctagaatttttctgggctttttttatttttagtataacttgacaaattttatttaatgggatagttttaatttataatcatctttgaaaagatgactattgataagtaaggtataaaattggtaagtatcaaaaaatatactaaataaaaattatagtcctaatgagttaatttctgtattttcaaataatgcagtatttagtcatgtgtttttatatgcgcctgtatttccaattaccaatatattagaataagctactgtaattagatttagaaaaaagcgacataaataattataaacaaataataaattacataaaattaaatttattcacaagtatatcttataaaatatgttataattaatagaaaattgtcatataattaattaagtagtattattataaataacattgaaaggtagtggttagaatatggatatccataataaatatgtaaattttataaaaaatatacctgtaccttttttatattgtagaattgtaaagagacaagaagatatagaatatcgagtagaatatataagtaagggtatgggcaaagtattacaattagaagaaggtatttgtgataaaaatatactagatgtattgcctgtatttaagtctaaaaaatatttcaaagagttgttctcaaatgaagtggattgtataaaaaggtacattccgacacttaaaaactggataaatataaaaaaacagataataggggattcatacataattttgtattttggtaaaattgtatttgattatagacagataatcgattcctttgataaaaaggaaaaagtagcttatattaaagacgaagaaggcatatatatagattgcagtgaaaatttaataccaatattaaataacaacattaaaacaacgaaagatatctttggtaaaaatgatatagaagtatggggagagaatacaggaaaattatttagagatgattatagaggaggagtatctagtaaaaaaagatttttacaaaatctttttgaatatgaagaaacattttttatggttgaaaaatattttttgtatgatgaagacgaacttttaggtactatagggataatagataatataatatatagtggttacagtaatagaaattataactcaaaagatttaatgaagatgatagaacactcaattccagagaatatgttttataaagatgtgtatggaaattatattggatttaattcaggttttttgaatttagcttgtatgaataaagaagaattattagggaagaatagttataaaatatcagaagaagaagctttaataaataagatatttgaaagtgataagggtgtagttgaaaataaaaaagtagttacatttgagttaaatgtaagtataaatgatgaaaataagtgtattgagattacaaaaaggccgttttttgatagctatggaagtgttattggaataattggaacagcaagggatataagtagaagaaaaagattagaagaggaaatggataaaactaggatggaattttttgcaaatttatcccatgaacttagaacgcctataaatttaatatcatcttcattacaagtgatagaaaaaaaagaagcagatttaatagaatcaaatgatactttaaaaagaaatttaggtataataaaacaaaatggaaatagaatactgaggttagtaaataatgttatagactttacaaaaatgcaatcaggatatttagattttaaaccagaagaatctgatataattgcatttatagaggagatatgtatgtctgtagctgattttgcaagccaaaataatatacaacttacatttgatacagaaatagaagaattttcaatgttatttgattcagaaaaattggaaagaataatattaaatttactttctaatggaattaagtacaataagaaagatggaaaaataaatatatttttatatgtgaaagataatgtatttaatatgaaaatatctgatagtggaataggtataccaaaagaaaaaatagataaaatatttaatagatttgaacagattgacaatgaactttcctacagagttaaaggaagtggtattggactttcattagtgaaatctttggttgaattgcatgagggaagtatatctttaaaaagtcaacttggtattggaagtgaatttatagtttcattacctgttagaagtgaaaataatattgaaaaatataatcataaaagagaaatcagcaatgaactaagtaaaaaattagaaatagagttttcggatttataagtttaaatataaaaaataaaattttaaaaaagtattgacaattgatttagaagggtttaaaataaattacaacataataaataaaaaggcgatgaataggaagagtaaatctaattcgattaccagagagaagagtccattggctggaagactttttaaattagagggattgaaaactacctaggagctactttctgaagtcatctgcattagtagattttagtaagaatagtcgttagctgcgttaaagtgtaaagtgagttttcatgatatatgaaaactaaattaggtggaaccgcgggaataatactctcgtccttatgttataaggatgagagttttttgttgtttaaaaatataaacagtaatcataataattatagaaaatataaaagcgatgaataggaagagtaaatttaattcgactatcagagaggaaagttcacaggctgaaagactttctaagtttgagaaattgaaaactacctaggagctgtggtctgaagttactttaaaaagttttagtaagactaaccgttaactgcgttaaagtgtaaagtggattttatcaataaatgataaaatcaaattgggtggaaccgcgagtatagactcgtccctttatatagggatgagtctatttttattgcaataaaagattgaaaataaaaaaaaatcggaaaattataaatttaggaggaaaataaaatggaaaataaagtgaaaattggagtactaggatatggagttgtaggaagtggacttatagatataatagataataataaagaaaaaagaagtatagaaatagttggaattttagttaataatttggaaaaacataaggataaaaaatattctaatataataactaataatatagatgatatatttaataaagatatagatatacttgttgaagtcatgggtggtttagaaccatcattatcttatataaaaaaagcattaaacaataaaattcatgttgttacagcaaataaagatttgttagctgaatgtggagatgagcttgcaaaattagcaagtgaaaataaagtaagtattaaatttgaagcttcagtcgcaggaggtattccagtattaaaaccaataatagaatcactagaaggaaataatatagatagtataaatgcaattttaaatggaactactaattttatattatctaaaatgtatgatgagaatctatcttatgatatggcattaagacaagctcaagaattaggttttgctgaagcaaatccagagtcagatgtattagggtatgatgctgctagaaaactatcaatattatcaactctagcttatgacaatagagtatattggaaggatgtgtatttagaaggaattacagatatagatgaaaaagatattgaatatgcaaaaaaattaaattgtaaaataaaattgattggtcaaagtaagtatgaaaatgataaagtaagtgcttttgttagacctgttttagtagaaaaagataatatccttgctagaatagacaatgagttcaatgctgtcatagtgaatggagattcagtaggagaagtttcttttgtaggtaaaggagctggaagtttagcaacaggaagtgcggtttattcagatgttatagatataatagataatagagtttcaagtatagattcttttactaaagataaaatacaagttaataaaatagttagagaaaagtgtggagcacttcttagatttaaaaaatgtaataaagatgaaattctaaatatagttgagaattgtttagtaaaattcgatattttaaatgatgatgatgaacttgctattatggtttatgctgattctgaatatgaaataaacaacagtttatgtctaataaaagataaaggatattgcgaaaaaatgaataaaatgttgaaaataagttaaaaaagaaaaaataagtttatatgtaacatattttgacgattttaatactatatagtatgagatgaaacaaaacatctcataaaaaattaaaattcaagggagagatatgttatatggaaaataaaaaatatgcaaatggtggttattcagaagactggtatgaaagaggagaatctacagctaaatggttccagaatgatagagaagaatatgaaagagcagcatacgatgaagatagagaaagaagaggctcaaactgtggatgttcagattcaggaggaaatagacctagaaactgtgaaagatttagaagagaagctgagataagagaaagagaagcaagagaagcattctgtgaatcttcagagagaaagaaagaagcactagcatatgaatgtgaagctagaaaattatgggaagaagcagaaaaatactgggatgaatattcaaaatacaactataaaggaatcgaatatttagcagaagctgctagattatttgatgaaggtatggaatgtgaagctagaagaaatggaaataatggaggaaacaataataattgttgccataaatgccataaatgtaattgtaactgctgtagaaaataaaaaaattcattgacaaatcaatagttaaaatatatcatattatgtataataaagagaaaattcagaaaaaaataatgattagaataaatttaagtatatttattagacaaatagtgctcagttagtgaggtgagtacaatatgattaaactcccatcctctagcttttgatagagggtgggagtttttatttattgatatatcttaaatgaggataatattgtaaaataaatgagtatgagattgtaaaattaggaggtaaaaaatgaaaagtattaaaacatcaagtatgaaagaaaaggtagatgaaaagatattaagagagcaagtaagttctataatagaagatataagaaataataaggatgttgcacttaaaaaatataatgagaagtttgatagaaatacaagagatgaatttagaattactaaggaagaaataaaggaagcttataagcatgtagatgacgaatttataaataacttaaagattgctgccaaaaatataagagaatttgctaaagctcaaaaactaagttttgaaaacccttttgaaaaagaaatttatccaggtgtaatcttaggtcaaactaatattccaatagagtcatgtcttgcatatgttccaggaggtcagtatccattgttttcaacagctcttatgcttataatacctgcaaaagtagcaggagtaaaaagaatagtggcatgttcaccaactatgaaaaatactgaaaagataaatcctaaaacattggtagctatggatatagcaggtgctgatgaaatatatgcaactggaggagttcaagctatagcagcatttacatatggaacagaaaagattaatccagttgacataattgtaggaccaggaaataagtttgtaactgaagctaaaagacaatgttatggacaagtaggaattgattttgtcgctgggccaagtgaagttcttataatagcggatgaaacttcaaatccagtttatattgcagctgatttattagcacaatgtgagcatgatttaaatgcaagaggaatattattgacaaatagcttggaagtagcacaaaaagttgaaaaaaatatagaaagtatgctaaaagatttgccaacaaaggacatagcatatagttcatgggaaaataatggagagataatattggttgatgatatggaagaagccattaaaataagtaatttttatgcaccagaacatttagaagttgcagtaaatgagtataatgatatttgtgatagattaactaactatggttctttatttattggaaatctttctgctgaggtgtttggtgactatgtttcaggtaccaatcatacattaccaacacttaaagcatcaagatatactggtggtgtttgggttggaacttttatcaaaacttgtacaaagcagatatttaatgaaaaagctatacaatcattagcacctgtagctgaaaagctggcaaaagaagagggattatatgcacatgcaaaggctgctgaggttaggtttaaaaagtagtaaaaaattttattttggcagtcgagatttagtattagactgagataaagaaaacgctgagaacctgaataaatactatattttgtgggcctcggcgtttcttttatatctgtatataataggataatactacctgtgtgtttaaatgctaacttaatatttcttttctaaataatgtttatgaaatagttaatatttttagttaatacttgaaaaaaacttttgctaactgtgcaaattcatctgcatttgtcaatatagcagggtgtcctccctgactaaaaatgtgaatacttgcttttgaaataaaagttgccatttgcttgtactcttcttcaagattatgacgacacatttcgtcttccttacttcctgtaaataaaattggcatttctaatttacacaattctttatgaaataaagggcgtttcttgtttgcacattgcaatagagcttttgtatcaagattaacaacattctcccaatcttttccatgacaccattcatagaattttcgtgcttgaatatcttgctttgatttttcccttccagtgattagattatctatgaagttatcattaagagtacgtccatcaaagctatctgctataattgcttcaactaaatcgggacgttctaatccagtattaacagctgcccatgctcctccacttgttccaattaagccaactttaccacaattcaaatgttcaatcagtgctattgtctgtaaggcttcatcatgccatatgtcaggagaaaattgagaaactctatcagactgtccattacctaaaaaatcaattaagatacatctaaaattttctacatataatggcacaagtgctttaaacatattagaagaaccagtattaccatgcaggaaaattatcggtttaccttgtccatattctttataaaaacaagaattaccttgatactgaaaatatgacatatattttcctcctttttatttgttaagttaattataacaatataggtatgaatgaaaaacctcatgttctttcttagaataaaaatgtgccacgcataaaacgtgacacatttctaattataaattttgctgtttaagtattctttgtatgcttttctctgtcaaaaagtatttctctgataactgcttgatactcattccattttggaaatttatacagatttgagaattacgagaagctaagacttgtttggtgtttgtgttttcaccccaatgctttttgtgctcttgctttttgggaatataaatcactttaccatctatatattcttgcacttgctcaatcagttctttaggcagtaagtcaatcgaattttgatagctcattttgcacctcctaaataattactctttaggattagcaaaggctactgctactcacaattaaaaataaaattttttattatgtacaatagcctttgctatgcacaagttccaattcccataaactaaatactcctttctggtttgaaaaattcatctgaacattgatttcgattttaagatagagttcaatgacaaatttacatttttattatatatattcagatagataattgcaactgtctttgtatgaggatattttattatagtcaatactataatatatatttatatcatcaaactaatatgaacagttgaaaggaatatgaacaataaaacttagtcaggaagaataattatgaagcagacaattgagaaatttgattttaaagttttattgaaaatttattgacaaatttaacttgtaaatattatactaaacttaataaataaagtttataaagtaaggtgttgtctatgaaaaatatagttggaaaaccgcaaacgataaaaaaagtaaatgaagatttaataaaaaacattataaaaaatgaaggtcctataacaaaaccagaaatttcaagcattactgaattgagtttagctacagttaataagattgtggagcaattagctttgaaaaatgaagttaaagtaagtggactaagtgaatctactggaggaagaagagctcaattatttgaaataaatgcaaacttagaacacataatagctttatattattatagaaattgttgtataggggtagttgccaatttattaggtgaaataatttatcaagaagaatttaatataagaatggatacatatgaaaacgttaaccaagatactttttttgttatagatactctaataaaaaaggaaaaaggaaacaatataagggctattggaattggtgtcccaggagttgtaaaaaaaggtgtagttaaaaatataccaactataaaaagttgggaaggtataaatttagaaaatttaataaagagtaagtacaatactaaagtgtttatagaaaatgatacaaatattactactattgggatttatcaaaaacagtataaagacaaatataaaaatatggctcttatgtatttagaagatggtattggttcaggtatagttataaatggtgaattgtatttaggttctacaaattttgctggagaattaagttatctaaatatagaatttggtaagtataactctaacaacttaaatcttgaagattatattatgagtttaagaaaaagatatttagaaagtaaagataataaatttaagaaagaaattttatctataatatcaaactttataaggactcttgtatgtgtcctaaatccacaagctatgattatacagtgtagtatattaaccaagagtgacatggagtttatagaaaaagatgtaagtaataatgttggagaagaaaattttcctaaattaataaaagtagagtcattgagagaaagaagtataaatggagtaattagtatgtgtttaaaagaaactgactatcaatattccttatctaataaaaaaggaggatattaatgtgaaatatttggtttcaatagatggagggggaacaaaaactaaattttgtgtaagtgacttagatggaaacatacttaaagaacataccactggttcaactaattataagtcagttggaattaaaaaaacatatgaaaatattaataatggacttaaaaaaatattaaaagatttatatatcgattatgacgatattgagtacactgtatttggtatatctggttgtgattctcctaatgattataagattataatggatgaaatattaaaaattgggattaacaaagaaaaaatatatctggcaaatgatgcagttttagctttttatgcacaagctgattcccctggtttagtaattgtggctgggacaggttcaattatactgggaattaaagaagatggagaaatatatagagttggtggatgggggtataattttagtgatttgggttctggatatgatatagggagaaaattattaaagaaagtattgctttattgtgatgaatgtcatgagtatagtgatttatttagttgtgtcttggatttctttggagcaaatagttttgaacaacttgcatatatgattactgatataaacaataatgttgaaatagcaaacctagcttcattagtgattgattgtgccgaacaaggtgataaattagctattgaaatattaagagaatcatcaactgaactatctaaattagctcaagtaatattgagaaaaatatctaatccaatgaaaatagataaaagcgaaataaatatagttttgtctggtggtacattaaataaaactgtatatgctcaaatgttaatgaataatttaaaaacagaaaatacagataaaaatttaaaatttatatctcaagaaaatcagccagtatatggggggataagacttgctatggcattagctaataggagagttaagcatggatagaaaaaaggtaatagtacaaatttttactggaggttttaaggctaaagaaataaagtttaatgatataaaatgtaaactactagaattattggactgtattgatatagaaaaggttatcatgggatggagtgtagatgaagaattatatgtagaaactaaaaaactattaaataaatataatgttgaactatatctttggttgccatgtttttctgaaataggattacttgaaaaaagtaatttactaattgattatatggggaaggaagtcaagggctatgctttacaagaggatgaaaattttgaattttattgcccaaataataaggaaaatataaaaaatataaagaaaatatatagtacttattttagtgatattaaatttgatggaatttttttagataaaataaggtatggttctttttcgaataaactaaatggtgtttttaattgtttttgtaaagattgtttaaatatatatgaaaaaaataatattgataaaaagtcgttaatgagagaaatgaataatgtgtctaagggagttatagataatgaagatactccatctggtataacagaatacattaatggaaaatacaaatttaaaaataaaatatgggaagatttttttgaaacaaaaaatcaaaatatatacaagtcattattagagataagtagttattttaaaagtaagggattgaaaataggtatagatactttttctccttttatttcttactttacaggtcaagatttaaaaaaattacaagaagtagcagattttataaaaccaatgatgtatagaactacaaaagctccagctggtttaccatttgaatttgaaaggtttattgatgaatccatacataagaataaagagattggaaaaagaaatttcttagatattttaggaattaaagagtatgaaggagatgtatatcctatagaatttgtactagaggaaatcgattttatgacaaggaatcttaataaagatatatatgtaggagttgaaataaataaaaaggaaattatagctcctgttacacctaagtacataagtgaaaatatttcaaatataaataagacaacagtaaaaggatatgttttatcttgggatttgttatcagcaccaaaagaaaatattgatgaaattataaaatggtttcggaattagtgaggtgatatagtgagtaagatattagaaatgcaacaaatatataaaagttttggaaaggtagatgttttaaaagggataaattttgagttagaaaagggagaagtaagagctcttttgggagctaatggagcaggaaaatctacacttattaaaattttaggaggagttcattctcaaactaaaggtaaagtaattttgactggtaatgaaataatgtttaaaaattcacatcattctaaagaaaatggtattagtataatttatcaagaattaagcttgataccaacgcttacagtacttgaaaatatttttcttggtagagaaattttaaaaggaagtgtgtttttaaacaagaaagacatgcttgaggaatatatgaaaatttgtgaggattttgattttaatatagacccacatacagtagtttctaatttaagtgtagcaaaccaacaaatggttgagataatgaaagctgtttcatgtaattctgaaattatcataatggatgaacctacaacatcacttactaataatgaaaaagatgggctatttaaaataataagtagactaaagtctaaaggtaaaacaatagtctatatttctcacatattagaggaagtttttaaagtatgtgatagtgcaagtataatgaaaaatggaattatgattggaacttatgatgtagaggatttaactaaattaaagataactcaacttatgacaggaaatgataatcacaaacttattgagaagaaggattatacatttgcaaagtatgaagagccaccagtactagaagtaaagaatataagctggtctaacaaaataaaaaatgtttcatttaaagtttatagaggcgaagttgtaggtcttgctggtcttgtaggttcaagaagaactgaaattataaatttgatatttggtatagataataaagatagtggagacatttttatcaatggtaaaaaagtagacataacttctcctaaggttgctataaaaaacaaaataggattgattcctgaagatagaaaaaatctaggattaattttagaacaagctatatacacaaactcatcatcagtacaaattgataaattcaagaaatttttgtttatagatagaaataaagaaattgagttttctaaaaaaggtgttaaggaattaggaataaaagttagtgatgtaaagcaagaagtaaaagagcttagtggtggaaatcaacaaaaagtagtagtttctaagtggttagagaaagatttagatttaataatatatgatgagccgacaaagggaatagatattgctgcaaaagaagatattttcaatacaatcaaagaattttcaagtgaaggaataggagtaatatttatatcttctgatttagaagaagtaataagagtaagtgatagaattttagtaactagagaaggttctattgtagatgatttaaaaaatgagaatatacaggttcaagatataatgaacagtatatttaatgtataaaaaatgaaaatggaggactgagatgaagaaagcttttgagaagttaaatttaagagattatggagtattattaggttttttagctttatgtatagctataagtattgcaactccatcatttttaggtaaacaaaatatacttaatcttttacgacaatcttctataattggaataatttcagcaggtatgacttttgttataatatctggaaactttgatatatcagttggagcagtagcagctcttgcaggtgctataacaatgaaatttgcgactggtggaactaatttgtttgcatccatgctcttaggtgtagcgatttgtgcagtaataggattaatcaatggtatagtagttgcaaagataaatgtaccatcattaatagcaactatggctatggtcactattgtaagaggattgctgttgatgcttacaggaggatatccaattactgaaaatataccaatacttgattacattggaaatggatatttgtttaatataccaataccagtagtaattttctttatagtggtgttagtttcatttattgtacttaataaaactaagtttggtagatatgtttattctgtaggagggaatcaagaagcaagtaaacttaatggtataaatgtagattctcacaaagtgaaagtgtttattattaatgctgtacttgcaggaatagctggaatcgtactaacaggaagacttgggactgcaactgctattgcaggtgaaggatatgatatggatgcaattgcatctgtagtaataggaggtacatcagtggcaggaggttctggttctgtacttaaaactgttataggagtattacttatgagtgttataaacaacagttttaatcttcttggaatagatgtatatttccagtacatatttaaaggattaataattttagcagcagttggatttgattcttatagcaagaaaaaacttgcttcaagataaaaaataagggggatttttttatgaaaaaattaatgaaacatttagcattgttgttatcacttgttatgatatttggtttagttggttgttcaaatggtggtgacaaagaaaaaaatggagaaaagaaaatagcagtattactaccaggttcaacaggttactttgtagcaactaaacaaggtatagatgcaaaatctaaagaattaggtgtaagcgtggaatatgcagatgctcaatgggatgctagtaaacaattatcacaagctgaagattttatggctaaaggggtagacatgattgcattatgtggagttgattctgctgtaagtgagagaatagttaaagctgctaatgattcagacgtccctatagtagcatttacaaattctataggaagtaacccaactggagaatttaaaggtttagttacatatataggacaaaatgaggaggaaacaggagcactaactggaaaaattgctaaaaacttattaggagaaactggtgggaaagctgtattaatagaaggagtaccaggaactactccacaagtattaagaaaaaaaggtcttgaaaaagaattaaaagatagtaatatagaaatagtttataatcaaacttcaaattgggagaaagagcaagctttaaaagtaacagaagatttaattcaaaagaaaactgattttaatgttataatatgtcaagatgataattctgctacaggtgcaggtcaagctttaaaagatgctggtcttaaggataaagttaaagtcataggtttgggtggaagtaaagatggattaaaagctataactgatgggttaatagatggtacaacttatatgtctgctgtagaagaaggtggattagtcatagaaaaggcatctaaattccttaaaggtgaaaaaatagaacctgttacacaaattaaacaagttgaagttaacaaagataatatttcagagttcaagggtgaatggtaaattgtcatagataataaataagatttttagagttactttagaaactatataaagtaactctttttttaatttaatttagtgataaattattgaatagtatttctaaacaaataaaaaattaatataaacaaagacttaattatactaaattataagtaaaactaatataaacttatggaaaaaaggaaaacgtctaaagtattggaattactatagtgtaggtgtggtattaaaaaaacataaaaaaacataaaaaaattgttgaaaaaaatatagaaattttgtataattaaagatttgaaaagttcggtatacaaagccaattcttttgtatataatatatataaattcagaaaaaggaagggatatgtatggccaggcggttatttttagaaaggattggacttatatttttaggttcagcaatattagcatttggagtttataatttttattatttaaacaacataacagaaggtggagtgttaggtattttactactgttaaaaaatttattcaatatacaaccagcaatagcaaatgttgtaatagatggtttactacttttagtaggatataaatttttcggtaaaaaattccttatatattcaatagtagcttctataactttttcagtgttatatgacttatttgaagctataggacctctagtaccacaatcacaaaatatgcttttatcaactattttggcaggtgtaactgttggaactggtgtaggtatagtagtaaaagcaggttgtgcatcaggaggagacgatgctttagcattagtaatttctaagactacatctttgaacatagggcaagtttatttagcaacagatgttattgtattgttgttatcattattttatctatcagcgtttgatatcttttattctttgattgctgttacaattagtggcaaggtaattgattttatttattatcatggtaaaagtttggatatggatataagtaatgatatagttccagaatgttaatataaattaaataactttagattttattaggggtggcagatttgccaccttttttgtgtctaaatctttatagaaagtataatcccatctaggtttttgcaaatctcaaatatagaattatgttggaatgactgggaatacgattgctagatgtgcattttaaaaacccaattttatatttatgaaatactaatcattaatggatgtttcttaatcctatctttatacctaaaatgataagataaatgaagtagcaatacaaaactaaaatttgtaaaagagattaaattaaatggaggagctaaaatgttggatatagttatgatagcattgttattcataggatttgtttccatgaagttacttgctgattggtgtgggaaacaaactgagaaaaaataatgtaatgtatggagggattacctatgtggtttctggcagttgtaattataatgttaataatatatttggtatatgcgcttattaatcctgaaaaattttaaacagtataaggctaataagtaagttgaattggggggaacaatttttatggtgcagatagtaatagtgttagcgatttttatgattttagtaatacctatgggcaagtatttatatcatatagctactaatcaaaaaacatttggagatagactatttgataaagtggacaattttatatataaggtatgtagtatagataagaaaaaagaaatgaactggaaacagtatgcattagctttattatttacaaatgcagttatggtatttataggatatatcatacttagaactcaaagtatgcatatttttaatccaagtggaattaaaagtatggaacaaggactatcatttaatacaataataagttttatgacaaatacaaatcttcaacattattcaggtgaatcaggactttcatactttagtcagatgacagtgataatatatatgatgtttacatcagcagcaacaggatatgcggctgctatggcatttgtaagaggtctagtcggtaaaaagaaaacattgggaaatttttatgtagatttaattaggataacaacaagagtacttttaccaggagctttaattattgggcttatattagttacacaaggagtaccacaaacttttgctgggacagaaacagtgactactatagaaggaaagcttcaagatatagctagaggtcctgtggcagctcttgaatcaataaaacatttaggaacaaatggtggtggattctttggttcaaattcatcacacccatttgaaaatccaacaataatatcaaatatagtagaaatattatctatgatgatattaccaggagcttgtgttgttgcattcggtcacatgataaagaataaaaaacaaggttgggttgtgtttggcgcaatgtcaatcatatttttaataggtctagtagtgtgctttaaagcagaaagtgcaggaaaccctattttatcacaattagggcttaatcaaagtatgggaagtatggaaggtaaggaagttagatttggtatagcacaatcatcattattcacaacagtgactacttcctttacgacaggtacagttaataatatgcatgatacactgactcctttaggaggattagtaccacttttaaatatgatgctaaatgtagtatttggtggtaaaggcgtaggtctgatgaatatgttgatgtacgctataatagcagtattcttatgtggattaatggtaggaagaacaccagagtttttaactaagaaaatcgaaggaaaagaaatgaagcttattgctttacttattatattacatccacttttaatactaatgttctctggtctttcagtagcaataccagcagggcttgaaggaatttcaaatcctggattccatggattatcacaggtattgtatgagtttgcatcttcagcagccaataatggttcaggatttgaaggtctaggagataacactatgttttggaatataacaacaggtatagttatgttctttggaagatatgtgtctattatagtactactagcaatatcaagtttgttagcatctaaaaaagctgtaaatgaaagtataggaacacttagaacggataattttacatttacaatagttttagtacttgttgttttaattgttggtgctttaacatttttcccagccttagcgcttggacctatttcggagcatctagtgttgtggcactaaaaaattgggagggagtaaagttttatggaaactaaaaaaacaaagtttattacaaaagatattttcaaaacttccattatagaagcttttaaaaaattaaatcctaaatatatgatgaaaaatccagttatgtttgttgtagaaattggatttatagtaacattgatacttacaatagtacctagtttgtttggtgatgaaggcaataatttaagagcttataatgggattgtaacaataatcttatttataacagtcctttttgcaaattttgctgaagctgtagctgagggaagaggtaaagctcaagcagatacacttaagaaaactagaaaagatacagtagcaagggttatagatacgttaggaaatgaaaaaatgataagtgcaagtgagctaaaacttggtgatattgttttagtaaatgttggagaagttatcccaaatgatggagaagttatagagggcatagcttctgtggatgagtcagcaataactggagaatctgcacctgtcatgagagaatcaggtggagatttcgcatctgttacaggtggtactacagttgtaagtgactggttaaagataagaataacaacaaaaccaggagaatcgttcttagataaaatgatagctcttgtagaaggtgcttcaagacaaaaaacgccaaatgagattgctttaaatactttgttagtagggttaacacttatatttatggttgttttaatatctctttatccaatggcaaactatgcaggtgtaaagattccaatttctactatgatagctcttttggtatgtttaataccaactactataggtggattgttgtcagctattggtattgcaggtatggatagagtaactagatttaatgtaattgcaatgtcaggaaaagcagtagaagcttgtggagacgttgatactatgattttggataagacaggtacgattacttatgggaatagacttgcatcagaatttatagcagttggaaatgcagattcaaaagatttaataaattattctgttatgtgttcattaaaagatgatacaccagaaggaaaatctatagttgatttaggtatgaaattaggttcaacaggtaagacaaaagaggcagaggaagctgagtttgtagaattttctgcacaaactagaatgagtggtattaacttagctgatggtagagctataagaaaaggtgcttatgatagcataataaaaagagtaaaagaatctggtggtacagtgccagaagatttagaagaaaatgtaaatcgagtagctaaactaggaggaacacctttagtagtgtgtgtagataatgagatatatggaattatctacttaaaagatacagtaaaatcagggcttgtagaaagatttgctagacttcgagagataggaataaagacaataatgtgtacaggggataatcccttgacagcagctacaattgcaagagaagctggagtagatggatttattgcagaatgtaaaccagaagataaaatagatgctataaaaaaagaacaattagagggtaaaatagttgcaatgacaggtgatggaacaaatgatgctcctgcacttgctcaggcagatgtaggtcttgcaatgaatagtggtacaacatctgcaaaagaagcagcaaatatggtggatttagattcagacccaactaagatattggaagttgttgaaataggaaaacagcttttaataactcgtggggctttgacaacatttagtatagcaaatgatgttgcaaaatattttgcgattataccggctatatttactcttgcaatacctcaaatggagatattaaatgtaatgaaactttctacatcatttagtgcgatattatcagctttaatatttaatgctataattatcccatgtttaatacctcttgcaatgaagggagtaaaatatagacctatgaaatcacaagctatgttaatgagaaatatgcttatatttggtcttggtggagttatagtaccatttttaggaataaaattaattgatttattgattacacctttagtaatgattcttaatttaggttaataaatggaggatataaaaatgaaaacattaaagccagcattacttgtaagtattgtattgttagttgtttgtggacttgtatatccacttgttttgacaggtgtaagccaagttgcatttaaagataaagccaatggaagtatgatagaagtaaatggtgtaaaagtaggttcagaacttattggtcaaagctttacagatgcgagattctttaagggaagagtatcatcagtaaactataatacttatacaaaagaagatttagtaccagataaagatggaaatgcatcttatggaggtgtatcatcagggtcttttaattatggagctacaaatccagaacttcatgatagagtacaaaaagatatagaaaagtttttaaaggataatccaactgtcaaaagagaggatataccaacagatttacttacagcatcaggttcaggacttgaccctaatataagtccagcctctgcaaaaattcagataccagctatagcaaaagcgtctggaatatcagaaagtaaattacaaaaaattgtagatgataatacttccaaaaaactttttggagttttaggtgaagatagagttaatgtactaaaggttaatatagaggtcgcaaaaatattaggtcttatatagtattttgtggaattttagtaacaaaatattactcaagatttaatttaaaggttaaattttaaagagtgaaaatcaataatgattttcacttttttatttgaatattactaatatttggaataaagtgattgtaagtataaaatccaaaaaaaggttgcattatcaaaatgataatactataatatatttatcgttatcaatttgataatagatttggacatataggaggaaatagtatgttatataataacgcattagagttgataggaaacacacctgtagtaaggctgaataatttaggctgtactaatgggtgttctaacatatatgtaaaattagaaaaagtaaatccagcaggaagtataaaagatagagctgtttatgaaatgttagagggcttagagcaaagaggagaattaaaaaagggagatgtactagttgaagcaactagtggaaatactggtattgcattatctatgataggaaaattaaaaggatatgaagtagtaatcgtaatgcccgaaacaatgagcgttgagagaagagatttaatgaaggcttatggagcaaatttggtgcttacagatggtaaagctggaatggcaggttccatagaaaaagcaaatgaacttttaaaagaaaatccaaactataaaagcttaaaacaatttgaaaataaagataatccaaatgcacattataaaacaacagcagttgaaattatgaatgatgtcaaagatttagatatattcgtatgtggagttggaacaggtggtactttaataggaactgcaagatatttaaaagaacaaaatccaaacataagagtaattgcacttgaaccaaaaaaatctccagctatatcagaaaacaagactggacctcataaaatacaaggaataggtgctaactttgttcctgaaaattatgattctagtgtagttgatgaagtaatattagtagatgatgaagatgcatttgatacagttaaattacttgcagcaaaagagggaattttagtagggatatcttctggagcaaatatatttggtgctatagagatggcaaaaaagtatccagataaaaagatagttacagtagctccagatggagttgataagtatatgtctatgggaatattttaataattttatttgagggagtgaatactttgtttaagaaaataaataaagatattgaatatataatgaagaatgatccagcagctaggtctaagatagaagtttttttactttatccatcagttcatgcaatgataatgcataggatggctcatgctctttataagaagaagaagctttttacagcaagattaatatcccagatatccagatttatgactggcatagaaattcatcctggtgctaaaatgggggaaggtatattgatagaccatggaatgggtgttgtaattggagagacagctgaagtaggtaatagggtgacaatatatcaaggagctactttaggagctacaggaaaagatactggaaagagacatccaactgttggtgatgatgtattaattggtgctggaacaaaaatactaggacctttaaatataggttcaaattcaaaaattggtgcaaattctgttgtcgttaaggatgtacctaatggtgcaacagttgttggtataccagcaaaaatagtaaaaataagaaacctagaacctgtaaaaaagaataaaaaagaagtgtcctatgagtatgatgaattagataatgtatattatatataggatttatataactataaaataaactttataaaaattattttaaaaggtatttttttcaaatttgaggacataataaaaaagaactgaatgttacagttttggttcatcaatctttgataaacaagattttaaatttgtagcgtctaggaggattttattatgaaagcaaatgttaatcaagatacttgtataggttgtggattatgtccatcaatatgtccagaagtatttgatatgaaggatgatgggaaatcacatgttatagttgatgaagtaccaagtgatgctgaagaatcagcagcagaagctagagaaagctgtccagttgatgcaatagatgtgcattaataaaataaatgcctataaaaattgaattttcaatttttataggcatttgtcttttattcagttagtatttcaacccctgtttctgtaactaaaaccatacattcccattgagcagataatttaccatcttttgtataaatagtccaattattttcttcatcaacaaaaatttcgtgagttccttcatttaccataggttctattgtgaatatcatcccaggaaccaatagcatctcagtcccttttttagatacataacttacaaaagggtcttcatgaaagcttaatccaactccatgaccacctatttctctaacaacagagtatccatttttctttgcataagagttgatagcatcacctatatctcctaaaaatccccatggtttggcaacttcaagacctttttggacacattcctttgtaacttgaactaatttttttgcattttcattaacattacctatcataaacattcttgaagcatctgaatagtatccattaaaaatagtagaaacatctacatttataatatctccatcttttaagataatgtccttgcttggaataccatgacaaacttcattatttactgatgtacatacacttttaggaaatccattatagtctagtggagcagggatagctccattttgtagtgtaaagtcatgaaccaacttattcatatcttctgtagacattccaatttcgattttatctgaaatataatccaaaatttttgtgtttattacagcacttttttttatttcctcaatttgactttcattttttataatatcatgagttggtacaatatgacctaacttagcaaatgaatctattttattatccatatccatatgacattttttatattttttagtacttccacaccaacagctatcatttctatttaacttcataacttttcatccttcttttattatttatttaaattatgggttacataaactattttaaaacataaccattataaatattataacataaatactaagaaatcctttatagatagtgatttattcaaagtataaattattatatggttattgttgatgaaaagaggatagttaaatgtattattggatattagcgcacttaatagtttagttcaagtttttcaagaaaatcatatgttagaggacaattttcctttaaagtattttttgaatcttcatcaagataataatgcacaaatgattctgcaaaaaattcttctataaacttgcttatatatgcatgtgcaacttgtttagggtcataaagcttatatctttcctgagcaaatacttccataaattcttcagaatttgattttttatttaaaacatttttatctatagcatgtgcagtttcatgtaattctaaattttttgatgaatgtacatttgcatagctagggttactataacctattttagctactatagaattatttctatatataccaggtacatctttccaagtcttgcctgatcttacccaacatggaggtaattgatattttaaatcactaaattctggttcatcagttagatttgaatttattaattttatttttatatccttttctttaagtgtctgtaaatatttaatatttatttttgcaagtctgcttttcatattttcaacttcatctttatcataattcaagtcatcaggaagtataagcatttgttcaattatatctatgctactgtcttttatatcttcagattcttcatcaaatttatattgaagagtattattttcatagatagttatatttgtattattttccatataataagagtgaatatcctctaagtctaaaatattcatttgttgtaaaatatgttttgtttcgccactccatactactaaagaaagtgaattaaaattaattagtggattttcctttgcttttatatcattgcttatatctacatcaaatacatattcaattgagtcttctatgttaagactatctgtattctttttaatatataaatatgcttgttttaagtctatataaatctcatctaaagattcatcataaaattctgataaattattagtaaagagttcttcacttaaaagttcatttttatcagttatactttcaattaaaatattaatttcttttatcatatcgtaaatacttatttttctatttgctttttcactagatacattgcatggcgcaagagcaatgcaataaaaatctttttcttttttataaaaggctttaagtgattttgataaaagtgtaaagtctacacctatctgtaagttgaccttaagtgagtcattttgtaataattcagtattattttttttagctatatttaaattgttttccataatcattgccccctttttattagggtatcataatttttttatatgtgtcaatttgtttttttgaaaattataatttttttgaaaattttattttttataatttgtgaattttttattatagaaataaatatgttattattatgtcaaaatttagcattagattcatgtagagtatgttttatacatatattataattaattctttgaagattgcatattcaaaatacacaccattttttttaattctataatataatatttatatatttaatgttaggatgtgatttaaggtgtattttacatatattataagatgtaaagatgattctctatacactggatataccagtaatatagttagaagaatgaatgaacataagttaggaattaattcaaaatacacaagagcaaagggatttgaaaaactagaagtttattttgtgaccaacacaaaaagcaatgctatgaagttagaatactatataaaaaaattaactagaaataaaaaattgtctataataaaaaacccaagtatacttataaatttaattgataataaagaagattatattattggtaaggaaatagaacaattaacataaatatttatagtaacattataatgggtgcatatagtgtaaaaacttgacaataaatactattgtaatataatgaagttataaatatagtaaattaaaatagctaggggagccaagagctgagaggtataccgacccttacacctgatctggataataccagcgtaggaaagcttagtaaaaattcaagtatgtattatttgtgatatatgctatttctaagctatacctattgtaggtatagcttttttaattaagttatttaaattaaactttaggaggcaacaatgagtaattataaaataccaacacttacaatagctggctctgattcatctggaggagctgggattcaggctgatttgaaaacgtttagtgcaattggtacttatggtatgagtgtaataacagctataacagcacagaatactaaaggagtttttgctgtagaggatttaaataagaaaataataaaaaaacaaatagaggcagtctttgaagatatacctccaagagctgtaaaaataggaatggtttcaagtcctgagattatacttgaaatagttgagaatctaaagaaatacaatccaaaatatttggttgtggacccagtaatgatatctaaaagtggatattatctattaaagccagaggcaaaagaaaacttaattaagtatttgataccacttgcatacataattacaccaaatataccagaggcagaagaaataacaggaataaaaatacataatgtagatgatatgaagagagtaggagaagaaatactacaacttggacctaaatttgtacttatgaaaggaggtcatttagatggagaagcagtggatattttagttggtaaaaatatatttaaagtttataaaagtgaaagaattgataaaaaaaatacacatggaacagggtgcacattatcttctgcaataacatcttatctagcattaggatatgaaataacagaagcagtaaatctaagtaaaatctatataacagaagcaataaaaagaagttttgatataggtcatggagtaggaccagtacatcatttttataaatttgagtaataaaaaaatattggaggtagaatatgtataatttaattaaagatgtaaaaaaattaaatccattggtaattcattatactaataatgtaactataaatgattgtgctaatgtgactttagctgtaggagcaagtcctcttatgagtttttcatatgaggaagtagaagaaatggtaagtgtagcaaattctgtagtaataaatataggaactatgaactcaaatatgttggatttatttctattagctggaaaagcagcaaataagtacaataaacctgttgttttggacccagttggagtatttgcaagcaaagcgagagcagaacttacaagtagacttttaaatgaagtcaaatttagtgttgttaaagggaatgtatcagaaataaagtttataggtggctttaatgtaaggggtaaaggtgtagattcatttgatgaagaagaagattctactgagataataagaaagattgctgaaaagcttgaatgtgtagttgtagcaactggaaaaatagatataataactaatggtaaaggtatatataaaataaacaatggaactgataaattaaaaggaattacaggaactggatgtatgactgctagtttgattgcaagttttatggctgttactgagaatatattagaagcagcaacaatgggtgttcttacaatgtctttaagtggggaattagctaatttaaataatccaccaataggtacatttaaagaaaatcttatgaatgctatttatcaaatggatatagatactttaagtaaaaattctaatattgaatttttaaattaataaagagtaagggagacttaaaatgattgataaagaatctttaaaaaaatgcttaaagttgtatttggtaactgactctgaaatgcttaaaggtagagacttttataaatgtcttgaagatgcaatatcttctggaataacaactgtacaacttagagaaaaaaatgcttctggaagagagtttttaagaaaagctatgaaacttagagaaataactgaaagatatggtgttaagtttataataaatgatagagtggatatagcacttatttgtgatgcagatggagtacatgtaggacagagtgacattgatgtgagagaggttagaaagcttataggaaacaataaaattctaggagtatcagcaagaactttagaagaagctacttgtgcaaaaaatgatggcgcagactatttaggtgtagggtctatattcacaacatctactaaattagatgcaaaatcagcttcgtttgaaactgttaaagaaattaaagaaaaagtagacatgccatttgtgctaattggaggtataaatttagacaatatagataaacttaaatgtttagaaagtgacgggtatgctataatatcagctatattaaaagctgaagatatctctaaagaagtggaaaagtggacattaaaaatataaaattggctctggtagtgaaaaaaatggaaaaatttgatataatctaagagtaaaatttaagcaattataaatgataaacttttctacatatactttttaatcaagatatatgtagatttggttaaaaaggagctataaatgattaagatattgttagtgtgtgttggaggcatgtcttctaccctattggtaaataaaatggagaaggatgcaaaaaaaagaaatatagactgtaaaatatgggcagttggagaaggagatataaaatcggagcttgataactttgatattttacttcttggaccacaacttagatttatgcttgatgacgtaaagtctatagttggagatagagttccagtatctataatagatatggtaaactatggtacttgtaatggtcatgctgtgttaaattcggttttagaaatattaaaataaataataaaagtggattctatataatagagtccatttttattatttgttattaataggcttaaaacttagcttaccatttctttttttaatctccacatagcaagtgaaaaacttgaacagcacaatattaaaaatagtaggataacaggcagtatatctccaataagaatagtctcaccaaatattaagctacgtaaagcgttaataacatgggtaaatggattgagcatcactgctacttttaatcctccagataaactttctatagggaaaagagctgaacttaaaaagaaaataggaagtacaattgcagtcataattgtttcataaactatttcatttggcaataataaacttatagaataagctagacttgataaaaagaaggctgtcataaatatcagtactatcataagtaggattccaccaatgccagattctatccttactgagaagaatatacttactatacacaaaatagttacttctatgaaggaaactaagatagcttctaataattgaccaaggacgattgaatacctactgataggtgcaattaagactctatagaaacttccactgttcttcattataaagtttataataccaccactactacaagaagaaaacacaaccagtacaatgatacctggtagtataaaagcagtataattattgatatttatattattcatagtttggtttgcaatagaactataaagcacaagccaaagaaaaggttgtaatatagtaactacaaatgagattggatttttaaaacgccacttcatactacgccataagatatttaacattcccattcctcctttaagctttttttagaacttgtaagtgctaaaaatacatcttcgagacttggctctacaatttctattgcatcaaattctatatcatgttctaaaagccatttatttattaaagtaaaagcagttctactatcgtttacacttataaaaattgaattttctcgtacgctcataaactttactaaaccagtacttttaattgaatctttatatttttttatatcttcagtattatggaaagttatacgtagtatattttgtctaatgtaactacgtaaacttgatggtgttccttgtgctaaatcctttccattcttcataatacaaatattatcactcaattgttcagcttcttcaagataatgagtagttagaaatatagttgtgccgtactcatctctaatttttaataacatatcccacatagattttcttgaatcgacatccataccaacagttggttcatctaaaaataggattttaggagatgataccatattcatagctatgtccaatctacgttttacaccccctgaatatgatgaagtaggatattttaagtaactagataagtcaaacttatcaattaaagagtctattctttgttttgcaatctgtggttctactttatacattttactttgaaataccatattttccataagggataaatgttcatcaatagagatttgctgtgctacacaagcaatttgagtacgtatccaagaaggattatctactaaatcttttccaaacatttttacatttccagatgtaggtttgtaaaaggtagtcaaaatatttataagagaagatttaccagcaccattaggaccaagtaaagaaaaaatttctccagcatttacattaaagcttagaccatttaaagctttcacaccatttttatattcttttactaaattgtctatttcaatcgctaacatatattattcctcctctttaagtggaaatattatctctgtaatatagttatctgggtttccttttatcaacatacctggtcctttaataaatacttctctccaaggagtttgtatttttatattattttcatgaatatatttaaatatcatttcatacgtttttggcaaattactataagagcctgtgtgagtaaaaaataaagcttttgttttaggaaattcttttgtagttatacccatacgatttggagtttcagcagttggaacacataattccatttctgcaacaccagttttttggtcaacatcatagtagcaaaagaatggtgcaccgttagactttccttttatagctttaaatacatttggaaaatactttgttgcctcagtcataggtccattataacgcatggtagccactgtgactgattcgatatttttgatttcaattttgcaattcatttgtttacctcctaatgtgtgttcatattcttactagatttttaagcattaatacatataagattttgattagttgaaaacatataatcttatctcgtttgcttgttttcaagtctaacataacataaaatatatatcctctcatttgatgctccattttgtaaagctattatttaagctttactttagattttttagcaaattgaaataaagcaatttataaaataagtatttacaaattaagtgtattaatcgtataatacacttaataggatactagataaagtctgaaataaaggcgtatttttttaaagtaagtgtactatcgtattaatacactagaataggaggaatcatgaattttgaattagataatacaactcccatttatttgcaaatagtaaagtatataaagagacaaatagtaacaggagagttgaaaccaggagagacaataccatcaagaagagaaatggcacttaatctaaaagtaaacttaaatacagttcaaagagcatataaggagatgggtgatatgaatataataaatacttttaaaaattatcaaagcagtgtaacagttgatgaaaatatattaaaaaatttaaaattagagcttataaatgaatcactatctgtttttatagaagatatgaaagcaataaatgttagcaaagaagaagttttaaaaataatagaagataagtattagttttttaacaaatagaaaacttagtttagaaagtttatttataagcatattggatgtggaggatagtaaatatgatagaaataaagaatgtcagcaaaacatataaaaggatgcaagggcttaaaataagaaagatagaagctttaaaaaatgtaagttttaatatagaaaagggaaaaataactgcattacttggtataaatggtgttggtaaatcaactatgttaaaagcaatagcaggacttataaacattgatagtggagaaattcgtatagatggagaaaaaataaatgaaaaggtatacaataaattggcttttgttccagatgtacaatctcactttagcaatacaacaataaaagaaacatttgaatttatggaaattttttattcaaagtggaataaagaaaaatcaaaagaaatgatggacatatttaaattggatgaagatgaaataattgataacttgtcaaaaggaaacattgcaagagtaaaattaatacttggattttgccaagacccagagtacatacttcttgatgaaccatttacaggaattgatttgtttaagagggaagagtttataggagtaatagcgcaatatatggaggaaaatcaagccattatcataactactcatgagatagtagagatagaaagtttagttgatgaggttgtaattcttgatgaagggcagattataacttcatttaatgcagaagaattaagagaaagagaaggtaaatctatattagataagatgagggaggtatataagaatgaataaacttctatatctaataaatgtagatttgagaagaagcaataagttttatatagcttatatatcatttttttcattaattacacttagtttaaatttattcgaaattaataaatttaaaaattctaaatttattatgaacttagcaatagaagattttggaggtatattttatggactagggatacttagtaatcttggttttatccaaaatatattgttctttggaatgttgggactttttatatactatatttttatgtggaaaagagagttcttttcaaataatcaaagtatttatacacttatgatgttacctcaaaataagtttaagatttgtatatctaaatcaatagttttgataacaatgatatatggttttttgataagtcagacagcaacattatttatatgtaaatatatatttaatttcatttttagaaatattcctataatcaatatgaactttgccaaagatttatattatttaaacttgaagagtataccaattgattttatctcttttatggctatttatgtatttttactacttatagctatttctattgtaaattgctgtatattatttatcttttcctatataaataaattttatgtaattttaatcactttgctgattatagcaggcttatatttttcaacaatatatataaatataatcaatttatttagaaaatattataatcttataggatttcaatttaacaatttagtagcagggttattaagttttttaattataatgtttattctaaatggaatatcttatttgctaattaaaaagaaagtatctctttaaggaggggtggtatgaaattaaaatctaaaatatctatacttattatatttttgactttagcaatatattttagtataggtttattaaataatgaagataatttaaagataaaaactataaaaggtgactctaatgaattagaccatataaacataaattttggatatgctttgaatggatatataaattcatattatacaataaatggaagtaacaaaactaaaaagactgaattaataaaactacaaaaggatagtaagaacacaaataatttaattgatgtatctagtggttcagatttaattgctcatgttggatttgaaatgaatgaggagtcaaaagatataaactttgtgatagatgagaaaaaagaagatttagaaaaaggtgtatttccatcagaaggtagtgataaagaaattgaatatgaaaaattagatatgaataattttacaaggacaagatataaagtagataaaagtacagatgattattatgcaaatatactagcatcaaaaagatataaaaaatacttatatgtatctgtactttatgctacaagtgattcatcagaaaataacaaagaatattcaagtactatagatataataaaaattaatccagaaaataaaaaaatcaagactataaaaagtataaatttaagtaattatttttccgagaaataccaagacatagagaacataggtgtaagttatgctagcaaatatgaggataagatgtatattttagtaaatgtactaaatacaaacataggtgataatagtaattctaaatttcatttacttgagtataatcttgaagaaaataaggaaagcataatggaattaaaaactgatagcaaaatggctttagcaaaagcaaagttagaagctaataaattatatatggtaatgtcgaatgattatgataatagttcaattacagagttaaatttacttacctataatatattagataaaagcttagatgaagataaatatgttttagataatagagaaaaaagaggaattagaagtattgaaattgattcaaataaaatcgttgcatatacatcaaggctaaactctatattatcttgggataataaatttatgctatatataataaataaaaattctaaggaaattgtatatgaaggagaattacaatttaacagttcaaatagtatgttagaatttgaaataaagtaggtgagttgatgaaagatttaataagattattcgaatttgaattaaaaagaaatataaagaattatatatttataataatttgttgttgttcttttgtaattttaaacatagtaaaaaatttaaatgactataattacataatagaaaatgcagttaaaagtgaacagttaacaaaaatcggaaatacgatagaaacggtaaatgttacaggtttctcaagctttagaaatataatgggttctacagaatcgtggtttatatttggtataattgcatgtatttgctatgctttttttatttggtatagagactttaatggtaggagtaaatctatatatacacttataatgctacctaaaaatagaatcaatatttatatatctaaattattaaatatattatttctagtgtatagctatacagtagtacttacaatatctttgtttattgcaagtaagttgttgcctagacatatgcttggtaatgtcacaaactatggttttgtacaagaaacaatatatgagttaaaaatgttacttccatatagctttgaaatactatttgtagagtatatatttttattgataggatttgtatctgtagtatttacatcaattcttataaataaatctatttataaagtaagcactttaataagttttctatttttagttttggaaattttagtgtttataatttctatagaatttattataccttatgaatacagtgatgtatttactgttctatattcaagtataaacatatttgtatgtagtcttatatctaataaacttttgaagcaaaagattgacttttaggagggatattatgaaagcaaaaaatataggaaaatatacaatatgttttataatagtatgttttttaatgattactatgaccttaatattgagttattttaataaggataaactatctgtaaaaactttaaaaggcaatgtaaaagatatagggagagtaagtgtagtatatacacctaatataagcaaattttcttatgaggaggtaattataagtaaaaatggagtaagaaataataaaaaccccaaatcaagaattagaaatgattatttaaatattgacaaaaaatacagtgattttgttaatgataaaggaaaagaacttatatataaagatgatttgaatataggagaagcgtatacctctgttaagtctgatttagtacaaggaatgaatgctttaaatgattgtataaaggtttcaaataaaaatttaaaaagtggggtagaagaaaattttgatattaatttaaataagtctgattttaaagaaaacagttggaaaaccttgtttaataaaatatataaaggcaatttatatatggtaattagtgaaactaatatttcaggttctaaggtcaataatatttgtatattaaagatagatataaaaaataagtcttataaattattaaatagatttaatttaggattacagaatggatatcaacaaaatatcaatgaaattaaattttctattggaagtaaattatacttagaaatagtaaataataaaagtaaaaatggagatattgaaggacatgatagttactctaaccttattatatatgatatagaagataacacttttaatataagtaataaatttatggataatctaaacaaagaaaagaatgcaaatccaaaggagattggcttattaagtaaaactaagctagattatatgataaaaaataataaattgaatcttatagttacggatatgagtaattccataatcaatcttgtttatgatattaattctaatgagattaaattagaagattatgagatacttgatttaaaagtagattataatgaagcatcatctggagttaggaaagttaagttactggatgataagatttattctatttcaggtatgaagaacagtatatcaggagaattaaaaggatttaaagggattgttgatgtagtcggaactaagccagtaaaatttcaagtatttgatatgaaacttaaaaagaatatttatgaagctgagctaataaatggagatataagtttacaagaaaagttattttttgttgcaaattaagtattagaattaattttagaactttaaacttttatatgtatcacagataagtataagtaagggagtgtctcaaaataaactttttagttcatgagacactttttttatatgaaatcaaatatattttcattgtttagatttattttgataatgaaaaaaagattatctttattttaagaaagacatttatttataattatatacaaaaatattttttaatgtttttgtgtataattataacaatttaatttatattaatgcacttaaatttgaaatagaatgcttatagtggtaaaattaattattagaatattagaaataataaataaataatacattgtacttaaaagggggagaaatttaagatgaacaaaaaatatattaaagcagggaatttaattgatggaacaggaaatagtattatgcaaaataagggtataattattgatggagatactatagttgaaattgaagatataagagatgatttaaatggatatgatgtgtacgattacttagataaaactgttatgccaggcattatgaattgtcatgttcacttgacaatggagccagttggaaatccaaagatatattatgataatgtatcagatgtagagcttgtagtaaatacgataaaacaagttgatgcttatttggattcaggagtaacatatattagaagcttaggttgtcccaaatatgtggatgtacaacttaaaaatcttatagacaaagggtctatagatggtcctggtatagttacttcaggtccagttatatgtatgacaggagggcatggatattattttggtattgaaagtgatggagtggatgaatgtagaaaatcagccagaacagttttaaaaaatggagtagattgtgtaaagataatggcaactggaggtgtaacaactgatggagttgagccagggtcaccacaattaactttggaggaaatgaaggctgctgtagatgaagctataaaagcaggtaaaataactgccacacatgcacaaggaagaactggtataaaaaatgcagttcttgcaggaattacttctatagaacatggtgtttatttagatgatgaaataattgatttgatgcttgaaagaggaacttacttagttccaactgtggctgcaccatattttattctaaatgcaggaaaagaaagtggaataactgaagctactcttagaaagtgtgagattgttgccattccacataaagaatcattcctaaaagcatataaaaaaggaattaaaattgcagttggttctgatgcaggaacttcttataatgaacatggaaaaacatattatgaaatgaagctaatgtcagattatggtatggataatatggatataatagttgctgctacaaaaacagcatctgaacttttaagaattgataaaaattatggaactctagaaaaaggaaagaaagcagatgttatagttgtaaatggaaatccagtagagaatatagacgtacttgcagatgtgttagcagtatttaaacttggtaaaaaagttagataaatagtataaaaataaaaaagagtgtctaaagaaatttttaaataattatagacactcttttttattagtaataattaaatcttttatactttagaaaatagattctattttatatttagatataactctttaaaatcattcttatgcaatataatctatagaatctacacatacaaagtatattcttgaatcattagaatttccaagtactataacatcatttttcttacctagaacttcaacaccagttagaaccaaactaccagctactacagtaacttgattatttatatttgacatataaagattatctaggatacctttattacaacagcaatcatcacaatcgcagttacaattacattctttgtaatgttttttatcaagatagtaacctaaagatgctatgaaatcttcataatctgcaggtgtaatatcaaatgcaacagctttaagattacacaatgatgctaaatctacgtttgctaatggagtagatgcagcaagtataaaatcaattatagcagcaagtattgcatctaatatagccccaaggtctatcgtaggaggaataactgcatcaataagtgcaattaattcagctactcctggtatagttcctatagtattaattaatccctcaagagttaaagggactggaataggataagatactctaccagctatatctattaaatcacagttacaagcagaaaatctttcaaaagtaccatcaagtccagataaattatcttttggaggagctgaaagatctatacctaccaaattagcacctactataaagaaatctgagataaaagcaaattgattaaagtttacaaaaggtcttagagcatcatatcttagaagttctaaggcctctctcatactttttttacaacaacattgttttattttaggttctttatatttatttggataattatagtatctatcagctacttgataattttcatagtatctttcatttgtatttggataatcttcctcatattcttgtgtaaatctaaagtcctctctacatttattattttccactaaatacactccttttatattttaatttaaatgtatagataattaagcttatctatatagtaatattatatttataatgtaaaaaaatgttacaaaagatattataaacgaataaaaaataataatttgtcagataaacttgtaaatttttatgaataatccattctaaaacaaaaaactgtgtataaaaaaggtttatatgttatatttatataaatataacatatgaacgagaaaggagtggtttgataaatgattgaggtagataaattgtgtaagtcttttacaagggttgtaaaagatgataagaataaaagttcaataagaaagctaaagaaagtaaaaactaaaaaagaagaattttttgctgtaaataatgtttcatttaaagttatggaaggtgaaattgttggaatattaggtccaaatggtgcaggaaagactacattacttagaatgttaggtggcatattaacaccaacatcaggaagtataaatatttctggatatgattattcaatagatagaaattcagcaaaaaaagaaataggttatctctctggaaatacaaaactatatggaaggctttctccgagagaacttctaacaacttttgcaagtctatatgagatgtcaaaagaagatatagaagaatcaattgaaaatattgtaaaaataatggatatgagtgaatttatagataatagaattgaaaatctatcaactggtcagactcaaagaacatctatagcccgttgtttaatacattctccaaaagtatatatttttgatgagccaacactaggtctggatgttttaagtagtgcatctattatagattttatgaagaatgaaaaactaagaggaaaaactgttctttactcaactcattatatggaagaagcagaaactttatgtgacaagatttttatgattcacaatgggaaaataattgcatcaggaacaccacagagtttaaaagaggaatctggagtaaataatttgagagatgtattcataaaacttgccagaaaggaggacatttaaatgagaagtaagattgtaaaatacatatttaaaaaagaaatgttagacatattgagagataaaaagactttatttatgatgattgttgtgccacttcttttatatcctttacttatgttattaatgattcaagtaatgaatatgtctgcaagtagtatgaatagtaaggacattaatatagcttttaataataaacctaataaggtgttagtatccatgattgaagatgataatttagaaaaagatactaaaaatacttcaaatgataaaggcaaaataagagtgttagatgtagataactataaaaagtcattagaagaaaataaaattgatgcttatataaagatggaagaaaaaaaatcatctataaattatcaaatatatataaattcttctcaagaaaattcttctaatgcactaaaaagaattgaaactgttttggataaatataaaagatttaccatagaaaaaactttatctgaaaaaggattagatgtacaagctactttagaaccaataacatatagcactgtagatgttgcaaagacggaagaagtggcaggatactttttaggtcagatacttccatttatattaataataggagttttactaggttcaatatatccagcaatagatgttatggctggagaaaaggaaagaggtacattagaaacattatttacactcccaatatcaaacttagaactggttatgggaaaatatatggcagtttctcttagtgcaatagtaacagcaattttaaacattttatctatgggactgactatggcatttattttagttagtggaggtattagtagccaatttggctttggaaactttaattatggagacttagtcttaccaattataactactttaatttgcatatgtcttttttcaatggtagtttcagcaataagtatgtgtgtatgttcattagcaaaaagttttaaagatgctcaaaactacataacacctcttatgttaattattatgataccatcatatgtttctatgataccaaatatagtattggatagagtgacagctgtaatacctgtagtaaatatatctttacttataaaaagtgtattatcttttaaaagcgatttaaatttaatagccttagttttagcatcaaatgtagcctttgttatattggcaatcatactactgtctaagatgttcaattctgaggaaatactttttggtaatagtaagagtttttctttcttagagaaaagaagtaatataaaaaaagggtctataccaactgtaagtgatggtgttattttatatgcagtaggattagttctattgatttatgttggttctttagttcaaattaaatttggtatggcaggtattataatgacacaattcatgataatttctttaccattattatttgcatgctatattaaagctgattttaaagaggtatttagcttgacagttcctaaattaaagcatgtgtttgggagcattgttctttggattggtggatacatacttattatgattataacacagctaattttattcttatttcctcaaaatatggaagttgctgaaagtttaaataaggctctttttatcaaagatagtgttttactgaatttactagcaatagctttattaccagctatatgtgaagaactgttttttaggggatttatattttcttcatttagtaaatcaaaagataaaaataagtctatcaaactcgctataatatgtagtggggtactatttggtattatgcatatggattttattagaataattccaacatcaatattaggtattatatttgcatacagtgtgtataaatctggttcaatatttgtatcaatgttattgcattttttaaataatagtgtagcagttgtgttaaatcattatacaactggaaatataaccaacttatataaatttgttgaagttgatttttcgaacttaaatgtacttaaatttgccttaattcttctaataagtcttatattaattatgttaggattaagagttttagatagaaagtctttaagaaattaagtataaagttattatatagattaaaatattaataagcactaaagtatatggatatatcttgtatataaaaatactttagtgctattttatatattttaattatatgaattatttatcgtttcatttatgtaatgaaaatgttatataaatgaaacaataaataatttttattttagaaatttatatttaaataatcaagttgaaagtgagatactaaaaaaattaatttaggaattatttgatttattcatttataaaaattaattactgatttgtcgaaaccattgtaataagaaaaaaatgaaaaaataaagtgtgaatatgttgcaaatactgtattttaataaaaagtagtcatttcttgtaaaatggatagttttgaaaagaaaatattaaaattataatataaaaataaaatttttcagacaattcaaacaaaaataatcaccttttaataaataattatatgccaaaataatccaatttattttctattatacctatatgaaatatataaatcaatagttaagacaatgaatatgctacattctataattatagtagcagaaaattttacaaaattaaagtagatataaactatccattttacaagaaatggaaacttttgagatgtacttatttgctaataaaatagaggtgttttaatgggaggaaatttttatgaggaatttacaaaaaaaattgatgttttttttatttatttgtataattttacaaattacatacacaacaccagtctattctttatgcaaactctataaaaacaactccataaataactttgagtctattgtgtctaataatcagtttattagcaaatatgcaatacaaataatacttattatggctataatatgtatgatgcttatattctatataatatatgacaaattaaattttaaaattaaattgcaaaagatagcatatacagataatcttacaggagcaaatactatagataaatttgtaattgatgctaacaaaatactatgtaaaaatactcaagtaaagtatgctttattatatatagatattgataaatttaaatatataaatgatttatttggatatgaagttgggaatgaaattttgcgtaatttaacaaaaattattaagagtaatatatttgaagaggaaatgtttgcaagaatatctgcggataattttattataattatgaaatatatagaagaagaagatataacaaagaggttaaaaactatatttgaggaattagacttgtttaataataatcaagaagaaaagtataagttagttttaagttgtggaatctattttatacttccagaagatagagatatcaactcaatcatagatagggctaatatacctcataaaatggcaaagggaggacataaaagttcatatgcattttatgataataagattcatgaccaagagataaaagaaaaagagatggaaaatacaatgttttcaagtttagaaaataaagagtttattatatacttacaacctaagatagatcttaatacaggagagatacaaggttcagaagcacttgttaggtggaaacgtcctgataaagggctaatacctccaaatgaatttatcccattttttgaaagaaacggttttgttataaatttagatttatatgtgcttgaagaagtatgtatataccttagaaaatggattgatgcaggaataaatccagttactgtttcagttaatgtttcaagaatacatttatattgcaataattttatagaaacatacaaaaatataattgataaatacaatatacctgcaaagtatatagaacttgaattaacggagagtatcatatttgataattttgatattttaattgatataatgaataatttaaaaaaaataggatttttaatatctatggatgattttggttcagggtactcatcattaaatatgttaaaagaaattcctatggatatcttaaaacttgaccaaaaatttattatggaaacttataatagtaaaagaagcaaaataattgttactaaagtaatagaaatggcaaaagagttgggtatgaaagtcatatcagaaggagttgagacagaagaacagtttaaacttttaaaagaagtaaagtgtgatatggcacaaggatatttgtttggaaagccaatgccaattgaagaatttgaacatttaattgtatccaacttggtaagagggtaattaatctgtaatataaagaatttaataaattgtgttaaaaatggactctaatgtagtgttcattttttttgtgaaattttttatacttttactaaaaagtaattgacatatactttgtattattatattattgtattaataaattaatacaataatataataaggaggcatgaacatggaatgggaacttgataataacaaacctatatatatacaattagtagaacatttaaagttaaaaataatttcaggggaaattaaaataggatctaaattagaaacagtgagagcactagcagaagatgcggaagttaatccaaatacaatgcaaaaggctctaacagaacttgaaagacaaggtttagtttatagtcagagaactaaaggaagatttgtaacagatgataaggaaaaaataaaagctatgaaagaggaaatagctaatgtggagataaatacattaaaagtaaccttagaaaagcttggatatgatagagatgaaatgctaaaacttattacagaaaatctgaaaggagaattataaaatggataaaaatataagcaatgtttctcaagatggaatagttgaatttaaaggtgtaaacaagagttatggaactaagaatgttttaaaaaatattgatttaaatataccaaagggaaaaatagtcgggctgttagggcctaatggaagtggtaaaagtacaatgattaagctaatgaatggattattacagcctgataatggtgaaattatgataaatggaatgaaaccatccatagatactaaaaaaatagtttcatatttaccagaaagaacttatttaaatgattggatgaaggtatcagatttacttaagtttttctatgatttttatagtgattttgatgttagaagagcaaatgagatgattaaaagcttagatattgatgtaaatgaaaagctaaagacaatgtctaaaggaactaaagaaaaagttcaacttattttagtaatgtcaagaaatgcgagcatatatatattggatgaacctataggtggtgttgacccagctgcaaggtcatatatacttaagactatattaaaaaattattctgaagatagtactttactgattgctacccacttaataagtgaaatagaaaacatatgtgatgagataatattcatatcaaaaggagaaatagtgttacaaggagacgttgaagcaataagagaagaaaaaggaaaatctatagatgcattatttagggaggaatttaaatgttaggtaaattattaaaatatgagttaaaagcaagtggaagaatatttataccgttatatatagccatattgatagtagctgtatttaatggaatatttatgaatacaaatatacttcaggtacagggaataggaatactagtattaacaagtctttttatggcattaggagttttaactattgtagttacaattcaaaggtttagaaaaaatcttttgggggatgaaggttatttaatgtttactcttcctgttagcactagttcacttatattatctaaatgtataacagcacttatatacgctgtacttagttttatagttgcagtattcacttttggagttcttatgctttttggtacttctggaattttactacctgaaattttagatttgtttaacactagttttaaatggatttctgaaaactttttagatattttattattagtagtagtaatgtttatttcatattcatcatttattttgttattatatacatcaatctcaatgggacaattaccaaaattcaataaacatagaaacatagtggcatttgcttcttttatagctataaatatagtaatatcaattgttggagatgcagttggaagcatcttaccaaatgaagatacaaatatggtatatcatctttatcagagtcctagttttatgcttgcaatacttggtagtcttgtagttgcaatagcgttatttttcgctacaaaatttatattagataaaaaattaaatttagaataaatgtttttatatggagccatcttttgagtaatgttaaaagatggctcttattatttatgtagttaattcatgtatataatatgaatagtattttatttctagttaaatatatacatatgttgtataatgatattgcgtgtaaaaatttgtaagaataactatacactttatataagttatatcaagaaaatttaaaaatatatggatttgagggagaagatatgaaaagttatacaaaggctaagtggagtgtttggggtataattacattttcatttgttttagtattatttttaaggatgtcaactgctgttgtttcagacaatttagcaaatgagttaggttttaattctatacaaatttcaaatatagcatccttttgcctatatgcatatgcatttatgcaaatacctgcaggaattttgattgataaatatggagcaagaaaaattagcagtcttggaataataatggcaagtttagggtcaattttatttggtttgattcaaagtatagaattagcatatatttctcgtgtaattgtaggggcaggaacatcagtaatattactttgtattttaaaaattcaagggagatggtttaataagtcagaatttgcttctgcaacagctaaattttcatttgtaggaaatttaggtggagttcttgctacttttccacttgtgtttttgtctgaacttgttggttggagaaattcatttttattaatcggtataattggtgttgtaattggatgttttatatatattattgttagagatacaccaaaagagtatggattcaatgtagatactgaaccctatgaaaagtcagagaaggttaatattgttgatggtattaagtctgttataaagaacaaatcaacatggtataattcaatgataatgttctcttttgttggtcttacaagtgcatttataagcttgtggggagtaagatacataatggacgtttatggtgtgagtaagagtttttctgcgtttatagtatcattttttacatatggatttatatttggttcaataattatggattttgtatttgctaaaataaggtctagcaaatttaatataataaaatttggagcaatgatagatttgtttatatggattgtaattgtagttgtataccaggtaaaaccaccaattatagttttaccaatatcattctttattatgggatgtatagttatgtcacatctacaggtttttaatgatgccaagtataaaaataaagaaatttattctggactggcaactagtgttattaatacttttgaatttataggaagtggaattattaatttgattatagctatctctttacaagtaaattcatataatatagttgatggatataaaaaaggttttgtagtatttatagtactaagtattataactatagtatcatctcatataggggtaaaaaatgatgattgtaaggctatatagtgttttattaatagtttaatttagtattatattttgcatatatataacaaatagtttgcattttcctaagatgtataattggaatataaatcttgtttactatgtacaaatggtattgtattatattaaatagaaaataagaactttaaactataatattggttctaaaatataaggtaaggagttttttatggatacgacgaaaatagatgatataagcaagttagatttaaataatttagacattaataagatggatatgggaggtataatggaaagtctgctagaatgggctactacaagcggagtaaaacttataataggtatacttatactttctattggatttaaaataataaaaaaatttgtaaaccatgttatgttagtacttagtaaaagagatattgatttaactttaagaaggtttttgaagtctcttcttttgagtgtacttaaagttgccgttataatcattgttctggaatattggggaatgagtttgtccagttttgctgctgtgatagcatcagcaggggtagcaataggtttggctttacaaggtagtctatcaaattttgctggaggatttattatactattgattagaccttttaaagtaggagattacgtagaagcagcaggccatggaggaacggttgaacaaataggacttttttatacacaattggttactccagataataaacagatacttatacctaatggttctgtatcaaatgatagtctaataaactattcagcaaagaatactagacgagttgatttgacttttagtgtagggtatgaagatgatatactacatgttagaagagtacttaaagatattgttaataatcataaattaataataaatgagccagaaccatttataggagtagtagaacatggagataatgctgttaaatttgcaactagagtttggtgcaagacagaagattattggacaatttatcttgatttactagaagaggttaaagttaggtttgacgaagaaggaattacgattccatatcctaaaatggatttaacagtaaaagaattaaacaaaatttaattttttaatatagtgtttaaatttaagaatataatatagatatacttataaggtttgtaaaaaattaataagtactgttattttgtaagtaaaaatataaaagaatgggagtgtctcaaaatgaactttttagttcatgaggcactctttttgtacgaaataaaatatatttttattatttcaacaatgaaaaagatgcttgtttctattttgagacagtataatttttatgtaactttaattttagtaaatataaagttttaaaattgataaaataggaggaatttttaatataaaagggtaaataaagggtttagagggcataatatagaataaattaatatatttaaggaggatttttatgtgtaaaaaaacgtatttattagtggtaagtatacttatagcaggtttattaactgcatgtagtgggagcccaactaaggattcaggacaagcacaagataatacaaaaaaggaggcaaatgcttcaaataatgctttaaaagatgaaaaaaataatgaaaatttaatggaacaagattttaaagtgccatacacagatgcaataaacatatttaaagataaatacaaggatgctgatatagtagatttaagtcttgagagagatttaaataaatttgtttatactgtggaaggtgtagatgataataatgaatataagatgaaaattgatgctaatacaaaagatgtattagaagataaaacagaaaagttagattcagaagatttaaatggagttgctagaaaagaaaaattagatttaaatgacataattacacctcaacaagctatggaaattgcattaaaagaacaaaatggaatggttaaagaatggagtttagacaaagatttagatgttactttttataaaataagaatagataaagataaaaatgaatatgacataaaagtagattctaaaaagggaactgtattgaaggtagaaaaagaagattagaagatttaaactatctttaaaataatttcttttttgaataaattttgtttaaaatataacaagcagggtataaagagactaaataactattttaggaggagtacggtatgtcattgaaatcactaaaaataaaagaaaatttatattgggtaggttcacttgaccctgatttaagagtatttgacataattatgtatacaccttatggaactacttataattcatatgtattaaaaggaacagaaaaaacagttttgtttgagacagttaaagataagcattttgacaattatattgaaagattaaatgatttaaatatagattttgaaaaaatagactatattgttgtaagtcatactgaaccagaccatgcaggaagcgttgaaaagcttttggatttagctaaaaatgcaaaagtagtagcttcagaaacagcaattaaatatcttaaggaaatcgtaaacaaagactttgaatatgttgcagttacagatggagatacattatcaattggggacaaaactttagaatttttctctgtacctatgcttcattggccagatactatatacacatatataaaagaggataaaactcttgtaacatgtgattcatttggtagtcactatagtaatgataagatagtaaatacacttgatgaaaatgaagaaaaggattacttggatgctttaagatactattatgattgtataatgggtccatttaaaccatctatggtaactgctatagaaaagataaaagatttagatatagatactgtatgtccaggtcatggtccagtattaactgaaaatcctagaaaaattatagacctttattataactggagtgtaaaggaacaaataaagttagaaaaagaagttacaatttgttatgtttctgcacatggatatacaaagattatggcagaagctataaaagcatatattgaaaaaaatagcaactataaagtaaatttatttgatgtaatagagcataagcaagaagatattttggcaaaaatagcagtatcacaaggtgtattatttggaacaccaacaatattaggagatgcgttaaagcctatatgggatatattaatatcgttaaacccagttcttcatggtggaaaagttgcttcagtatttggttcatatggatggagtggagaaggtatagaaaatgctatggagagaataagtcagcttagaatgacagcagtaaaaccttttgctgttaactttaaaccatcaaatgaagagattgataaattacattcttatacaggtaaattcctagataagttaaattctacttttggaagtaaaaagaaaactaagaaatttaaatgtgtaatttgtaatgaagtttttgaaggtgatagtgctcctagtgtatgccctgtatgtggagctaaggaagaccaatttatagaagttgaagaagatgaagttacttttagaaaagatactgatgaatatttcgtaatagtaggaaatggagcagctggtttttatgcagcagatgctataagaaaaagaaataaaacttgtaagataactatgatttctaatgaagatgagttgacttactatagacctgcactttctgatggtataaatgaagaacttggttcagatttctacatggaagataaagattggtatgataaaaataatatagtagtaatattaggaacgaatgtagataaattagatgaagtgaataaaactattatagtgaatgatggagctattaaatttgataagcttgtaatagctacaggaagtagaaactttataccaccgattaagggccatgatttagaaaatgtgtttactcttagaaatataaaagatttatatagtgtaaaagaagcactagaaaaatctaagaaagttgtagtgattggtggcggtttattgggacttgaagctgcatgggaatttagactaaaaggattagaagtagtagtagttgaagccatggatagcatactatcaaaacaacttgataaagagggtagtaaaatattagaacaatgtgtaagagatacaggaatagatgtaagattgggtgtagcagttgatggtattgaaggtgatggaaaagctcaaaaagttgtatttaaagatggagatagtgttgactgtgatatggtagtattttcaattggtgtaagagcaaacactcaaatggttcaggatacatctgtaaaaattgatagaggtattgttgtagataagacattacagacaaatgttaaagatatatatgcttgtggagatgttgcacaagtgggaaatattagtttagcaatatggccatcttcagtagaaatgggaaaaatagcaggagcaaatgcaagtggagataatttgacatttgaaagtgaagtatatccagtttcattagatgcaatgaatgtaaaagtatttagtattggtaatatacaaaattttgataaagaaatttcatcaaaagatgaaggtcaaagaatatataaaaaattatttatgaaagatggttcattagttggagctatacttataaatgatttaagctgtactgttaaattgataagattaatatctgaaaaaggtgattttgaggatattatgaaggctgatatactataatttaaatacattaaaataaaaaggagttgtctcaaaattgatttttttctaatcaaattttaaattcaactccttttttgaatttttatataaaataacatggaaattttagtaatgtctgtggttacatacataggtttaattgttttttatatggattgtctctggtataataaattgaattgtgtttgactgatagatatttttattgaaagttaatacctgttatgcgataataaggacgtgttaggggagtttttataataacaattaatctcagtttttgtgttccaatagtagcatcaacacattctgatgtagtagttcttttcttataaaaattagttacaaatatgcttgtaattatttgatatgtaaatttaccaatattataaatgatgacctcgataataaggagagtgaaaaataatctatgaacgaaaatattttgattgtggatgatgaaaaagaaatagcagatttaattgaagtatatttaaaaaatgaaggttttacagtatacaagttttatacaggtaaggaagctctagaatgtattgaatctaaagatttggatatggctattttagatattatgcttcctgatattgatggatttcatatttgccagaaaattcgagaaaaatactattatcctatcattatgttaacagctaaaattgaagatatagacaagataatgggtttaaccataggtgctgatgattatataacaaagccatttaaccctttggaagttgttgcaagagtaaagacacaattaagaagatatatgcgatataataattcttatgaacaacagtcgataattgttaatgagtatgatattaaaggattgattatcaataaagaaacacataaatgtagtttatttgggaaagaagtagcattaacaccgattgaattttctattctttggtatttatgtgaacatcaaggaaaagtggttccttctgaagaattgtttgaagctgtatggggagaaaaatatcttgataataataacacagttatggctcatatagggcgattacgtgaaaaaattcatgaaccttctaaaaacccgaaatttataaaaactgtatggggagtaggttatacaattgaaaagtaaaaatattaaagtcaatcctgactttactcaagtgagaaataaaatttttatgagaacagctttaatggcatttatagccattattttcatatggattttatattcttttatattgtatggtaagttttctatctggatagtatcattctttgaaaatgcttttcgtatggaatataaagctgcattgaatttatatcagcagattttccgtaatagcatggagctcttcatgatactagctatggtgattgtgttttttataatattccgtgtttatttaaattggtttacaaaatattttagtgaaataaatcaaggtattgactctcttatcaaagaagatgttggagaagtggctttatctccagagttattggcaatagaaaagaaaataaactcaattaaacatatacttgaacaacgtaaatttgagacacaaatggcagaacaacgtaagaatgaacttattgtttatcttgcacatgatttaaaaacaccacttacatcagttatagggtatctgacactacttcgagatgaaagtcagatttctgaagaactgcgaaaaaaatatttatctatttcgttggataaggcagagcgtcttgaagatttaattaatgaattctttgaaattacaaggtttaatttatcaaatatatcacttgaatacagtacagtaagcttaactcgtatgcttgaacaactaacatatgagtttaaacctactttgatgagtaagaatttaaaatatacactgaatgttacaccaaatatgatgataaggtgtgatgttaataaaatgcaacgtgtatttgataacttattacgaaatgctgtttattatagttttgaagatactactattgaaataacagctgtacaggaggatgattatataaagcttaaatttataaatcatagcaatacgattccagaggaaaaacttgagcgtatttttgaacaattttacaggttggatacatctcgtaattcaaacagtggtagagctgggttgggacttgctatagctaaagaaatagtggagcttcataacgggacaataacagctcatagcgagaacaatataattacctttaaggttattattccgattgtaggaaatttgtaagaatttaagtataaaaaaataggaaattctttaggataaataaataaagagcactcttgttattgatataattactgtatcaaaacaagagtgcttttattttgatacagtaattatatcaatagaaaaatgtgaaaatatattatgtggaacagatgcaattgtaagtgaaggttgattggatttgaaatagaaaaagtattttaacatgtttctgtagattgtataaaaataaataaatcaacaaaggagaatcaaagatgaataataaaaaaattgcagttatatttggtggaaactcaacagaatatgatgtatcattacaatcagcttttgcagtacttgagaatttgaatacggaaaaatatgatattataccaattggaattacaagggagggtaattggtatcattatattggagattataataatatccagaataacacttggtttgaaagggatactgatataattccagttattgtttcgcagaaccgtgtcaaaaatggtattattgaatttttaattcctgatgctgtttctcagaatcatattccaaatagtgctattgaatcatgtgaaaatgatattaaatacactaaacttgattttgtatttcctgtattgcatggaaaaaatggagaagatggaacagtgcaggggttatttgaattggcaggtatacaggttattggatgtggtactctttcttcagcattatgtatggacaaagacaaatcacataaacttgttcattcagaaggtattaaagtaccaaaatcaatattactaaaatactcagataaatttaatgtggctgaactgtcaaaagacttaacttatccattatttataaaacctgtgcgtgcaggttcatcatttggtattagtaaaatttataaaaaagaagagttacaagtagcagtagacttggcttttgaacatgataatgaagtaataattgaggaaaatattgatggttttgaggtagggtgtgcagttttaggaaacgatgacttacttgttggaagagtagatgaaatagaattgtcaaaaggattttttgattatacagaaaaatatacattgaaaagttcaaaaattcatatgccagctagaattgatttggattgtgagaaaagaatacaagagacagcaaaaattatttatagaactcttggatgttctggatttgctagagtagatatgtttttaactccatctggtgaaattatttttaatgaagtcaatacaattcctggctttacttctcatagtcgttatccgaatatgatgaaaggtattggactgtcttttgaagaaatattggataagataattgaggtgtacataaaatgatgaataatattttattagataaaaataaagaagataaaatgacaaatactatcttattgactaaagataaagtttatgatgggaatctaattctagtaaatgcttttttaccagttaaaacatctgaagatatagatttaattcctgtagatacaaggtttccaagtattcttatgaaacgtgaagctacaaatattttacaaaatattttaaaaagtatatgtggaataaatgaaatagtacctgtaagtggatatcgtactgcagaggaacaacaagatatatattcaagctctctgcgtgacaatggaaaagactttactaaaaagtttgtagcacttccaaatcacagtgaacatcagacagggcttgctattgatttagggttgaagaaagaggttatagattttatctgccctgaatttccttataatggtatttgtaatgagttccgtaaggcagcactacattatggttttatagagcgttatcagtgtaaaaaagaagaaataacaggaatatctcaagaaccatggcattttcgttatgtcggatatccacattctgagattatcaataaaatgaatctcgcccttgaagaatatatagaatatattaagagattttcgtatacaaattgtttaaaaatagaagataaagaaaaaattatagaaatcttttatgtgcctattcatactaaagaagaagtgagaatctctatacctgaacaatgtgtatatcaaatatcgggtaacaataaggatggttttattgtgacattttggagaaatagaaaggactaagaaatggaggaacaagaatgattaggaataaatcttatgcagggcttgattattttaggattatagctgcattacttataattgcaattcatacatctccattattatcatatagtaaaatggctgactttgtgttaactagtataattgctcgtattgctgtgccattcttttttatgctatcaggcttttttctaatttcaacatataattataattgtaataaactgaaatcttttctaaaaaatgtattatttatttacgggatagctattgtaatttatattcccttaaatatttacactggatatttttccatgaataatttagtgcccaatattattaaggacattgtatttgatgggactttatatcatttatggtatctacctgcatcaattattggtgcaagtattgcatactttcttgtaaaaaaactaggtttaaagtactcattagtaatcactattgttatttatgtaattggtatgtttggtgatagttattatggttttttagaaaaaataccactattaaagaatttatatgggtatatttttgaagtatcagattatacacgaaatggtatattttttgcacctgtatttttcatacttggtggaataatatctaataaatctaattatatgtcaactaaaaatagcttgattggatttcttatatcattcttacttatgttatgtgagggaatgtttttacataaactaggggtacagcgtcatgatagcatgtatattatgttattgccatgtatgtatttcttatttacagccttaacatttttaaaaggttctcgagctaggttattgcgaacatcatcattaattatttatattatacatcctatgatgattgttgttattcgtatgttttctaaaatattcggaatacaaactgtcttggttgacaatagccttattcattatatagtggtaagtatagcatcttttatagcttctataattattatattgattcttaaacctctaaaaaaagacttgaaaggagaacataaggtaaataccaatagagcttggattgaaattgatttaaataatttggaacataatgtaaagatgatacaaaaagctatgccagaagattgtgaattgatggcagttgtaaaagctaatgcctatggtcatagtgcttttgaagtagcgacttgtgcaaaccaaataggtgtaaaagcatttgcagtagcaacaatagatgaggggattgatttacgtcgatatggaatactaggagaaatattgattcttggatatactaacccaataagggcaaaggaacttcataaatacaatcttacacagagtgttattgaccttaatcatgctatctctttaaacaaacagaaatacaacataaaatcacacattaaaattgatacaggtatgcacagactgggttttgatgttaatgatgtgaggtcaattttaaaggcatttaaattaaaatacttagatatatgtggcatatttacacacttgtgtgtttcagatagtctgaaagatgaagatgtagactttacaaataaacaaattgaatgtttttataagttaattgattttctgttaaaaaaaggtataaaaattcctaaagtacatattcaaagtagttatggtttttttaattatcccaatcttaagtgtaattatgtaagaattggaattgcattatacgggatattaagttctccaaatgatacgactaaattgcaacttgatttacgacctgttttatccttaaaatcacaagtaattcttattagaaaaatacaaaaagatgatagttttggatatggaagagtctttattgcaagcagagatagcgtaattgctatattatctattggctatgccgatggtatacctagaaatttatcctgtggaaaaagttacgtaataataaatggttgtagagcagcaatagtgggtcgaatttgcatggaccaacttgctgttgatattacagatatacctaatgtagaagttggtaatacggcaataataataggaagagataatttatctgaattatctgcttctgaagttgcaaataactcatgtagtatatcgaatgaattattgagcagagtaggaagaaggttaaatgttataaagaagtaactcaattaaatagtaatatttgttgtactgtgtaatttattttactctgactagacatttttagtaatattatgtctaatatatattttttataacttacatgacaatttaagttataaaaaggtgatgtttcagatttttattttgaaacatcaccttttttgttataatatataataaaataattataccttaactgtaaacttatatagattatttactttttaatattagattcattttttgagattggtatataataaacatatagagtatataataatagttaaagttaaaaaaggggaaaagcaatatgcagtatatacaagaattacttgatttgactcaaaattattgggtgttagccacaataatcggcttattaagtgcatttatagaaagctttataccagccttaccacttgttgctatagttacagcaaatgctgcaatacaaggattatttattggatgtttgttatcatggattggctcaggacttgggacaacttcattattcttattaataagcagatttaatgatagtaagctttttaataagttgagaaatagtaaaactgaaaaagcaataagttggatggataaacagggatttaagttattatttatagcgtatgcctgtccatttatgcctggttgtttagttactatcgcatcagcttttggtaaaaaagatttaaaagattttgtgccagcaatgttggcaggaaaatttgtaatgtttatagttataagttacgtggcaagtgatatagaaggttttataacaagtcctttaaagatagcatcatttatattattggtgtttttgtcatggaagattggaaatagagtaaataaaaatcttgaaaatcataattatgatttccatcataaaaaacatcacaatgataaagatgataaaatgatttagcttgtacgaaataaaacgtatcttaaaatgatttagtactaaattattttaagatacgttttattttttgtattaaggtacaaaatttttagttcttttgtaaactaaaatatataaaacttatttatacttagttcaaaatattgttatttattttttctacaactataataaaatataaaattgatatccaatcaaaaaaataactatgaaatttaatagcttagatatgaatttttctgtttttgagttagtttttataggtagtaaagaaatgtttatggtaatgggataaaacaattcaataccttctttagtaataaggtcaagacacaagtgagatagatatcctattataaacccactggacaaacatgagaaaactatattattgttagtgaagattgtcagagatttaaaaaaactataaataagtaataaggcaattagactgtgagtaaaccctctatgtctaaacctacttccaaataatttgtatattaacataaattttttacttatgtaagaacctctcatatctatatctggaaataaagaacctaaatatgcaaaataaatataaattataattaatactattttatatgcaatatcgtatttaactaggtacagattgtttataaaggggagtatcaaaagtgcgaatatataacctcccctttcatgtgtttcttttatcatataaaaatcctcctgaatcgtcactataaacattatattggtaaatttagactatcttttattatattatatagcaaacataagtttttttcaaaaggattttaatatttaattaatcttgagattttaaatttttgtaattttctaaagcaccattccaatttactacattaaaccagttgtcaatgtattcatttcttctattttgatattttaaatagtaagcatgctcccaaacatcaagtcctattataggagttaggtttttacttacagggctatcctgatttggagtagtcataatagataatttcccatctttagtagctacaagccaagcccaaccagaaccaaagacatctaaagcagatttttggaactcttgcttaaatttttcaaaagaaccaaagtctctatcaatagcttcttttaaagattcagaaggtatggttttttctggcgtcattatatcaaaaaagaatttatgattataagctccacctgcattatttcttacagttgtagcaatatctttaggtaaagaatctaaattttgcaataattcacataaagaataattataaagctcaggatatttttcaagagcagcatttaatttatcaacataagcttgataatgcttatcatgatgcagtttcattgtttctttatctatataaggttcaagtgcatcatatgcataaggtaatggtttaaccttaaatttgttattttcaggtgtaaaagcaaatgaagttatgcactgtgagattataaataaagacataataactggtattaatatttttttcttcataaaaatcacctcctaatatagtatttctagaaataaaaaaaatatgaaatattaacagataatttataagaatttaatagcaatttcattttaaattgaataagttttaaagccaaagacaaaactatgaaatatagaataagactaaaggacagaaaggaattttgattatatggacggcaatatttcaatttattataaaggtgatatatctaaaaaagaagatattaaatttaaaataaaagaatctgtaaataatacaagactttctagtagaatagagtataaggatgaggaaaaaacttttgattttgaaagatttaatgtaattgatgctatttatggaaataaaccatttgaaaaagatggaaaagttattgtttttaatggaaatatatataactatcatgaaataaaagaagaattaattaaaaaaggacacaattttactacaaatgatgatattgaagtcttattggcatcttatatagaatttggtaagaattgtgtacataagattaaaggaatgttcaactttataatctatgatagagaaaatgaaagtatatttggagcaagagatttatttgggataaaaccactttattatataaataaggaaaatgcaataattttttcctcagagtataagtttttacttgaatatatgaaaaatttaaatataaatgaaagaagcttacaaagttatttttcatttcaatatgtacttcctgaagatactatgatacaaggaataaggctgataccagcaggtcactattttagggtagaaaatggtatactatctttaaagagatataataaacttgagtttagaagtagtacaaaatttttttatactaaaaatcacttaggcaatagagatgtgaatgaggatgatataagaaatatagtagtagattcaatagtaactcatatggaagaggagaaagaaattggaacatttttgtctggtggaatagattcatctattataactactgtggcttcacaaattaatccaaatataaaatctttttctgcaggctttagtgtcaaaggatatagtgaattagaagtagcaaagaaaacagctgataagttaggtatagaaaatatccagattaatataacacaagatgaatatataaaatcattaccgaatgtaatttattctttggatgaccctatagcagacccttcagaagtaggtctttatttcttaattaaagaggcaggtaaacatgttaaagtagcattgtctggagaaggagcagatgaattatttggaggatataatatatataaagagtatagtactatgaaatcagttgtcaattcacctacttatattaaaagtatattaggaagagtttcagaacttatgccaaacataaaaggaagaaattatctttatagagctacaacaccattagaaaaaagatatataggaaatgcaaaagtttttgaaaacagcgaagtaaaaagattcttttttaagtataaggaaaagaatatatatgaatacctgttgtctaatttgtatagagatgcacaaaaaaataattacgattatataagtaaaatgcaacatatagatgtgaatacatggcttcaaggcgatatacttcaaaaaattagcaaactttctacagctgagcaggttgaacttagagtaccatttttatataaagatgtatttgatgtagcaaaaaatttaagaatggagcaaaaaataaataagaataatacaaaagttttacttagagaggcgtttagagaaatagtcccagaatatgttgttcaaaggaaaaaattaggatttccaactccaataagagtttggttaaaagattctctaggggatattgtaaaggaaactatttataattcaaatgtagatgaatttatagataaaaaatatgcaataaaacttttagatacgcatcttaaaggtcatagagataattcgagaaaaatatggactatatttacattttgtctatggcatcaattatttattgagcataaaaatgtcgagtattaatacttttttcaatattaatcagagggcaaaagcatgcaatgttttcaccctcttgattattatggaataggataagtagaattttgattgattagtttactatctcaataaaattattggcaaatattttgacaagattactttcaacagctaaatttaagttttgtccatcatcatatccagcggaaatcaatcctagtaagtttccaaacatatctaaaagagctcctcctgaactaccactagagattggagctgtaaattgtatcatttgaaccgtttcaaaatcacgaaaagctgagataattccatctgaaactgtattaaaaagacctaaagggcttccaattgcaactattttttgacctctcacaggttttttactgactttaacaggtattggtttgcattttctatcaacctttatcacagctaaatcataatctgaatggtattttataatttggtaagatgtataaactttatcatcattttcaaatctaactaaaaatgaatacccatcattgactacatgaagattcgtaagtatataaccttcattatttattactactccagaaccactcttaaacggtttattttcgttattgcacacaacaatcataacaacagaagctgataactttgcaaggtcttcataagaaagttctacttcctcatcttgtgcaatttttttagatgttagatttgtgttattaagtgtatttttagagttaggtttattcgtagtaggagaagtcttattggtattttcactgtaatttatatttgtaatatgcctttcaaaaggtatttctaatatatttggagttttcctagaaagttcaaatagagtagaaaattttgaacattcaggatataaatcaagaatatctttatttggatttatatataaaatatcacacccaagttgtgataaaaaatataagaaaaaaagttcttgccttttaatatttccaaagtatactatctttggtgaaatagtagtcttcaccttgttataaaataatttaggtagaaaatagtccatccaacacaaaagtttaactgcaaagtttttgatgatagaggatgtacaatttggcatacttgtggaaaataaatctaaagtatttttaaatgcaatctttttagtccaatttaaagtgtcattttctattttacatggaaagtcgatattatataaatcccaactgttaaacttagaactatcataaatattaaaaattttaagcatcttatctgtttgttctttgtcaaaatttatttttagattgtttaatctaatatagggaattgtaggattattaaaaaaataagtatctatatttttaactttttctatgtatttatcaattgaatcatcaacacctatatatcttgtaaagtggacttctttaatatatgaagaactcttatttttataggtagtatcagatataaattcaattagaggttcagttgacttttttattgaaatctttaatggtttaatagtacaaatcatattttttctcctataataagatgatataatctattataaaacaacttaaaacaatatagtacaataattttgtagtttcaaaataaaatatgtacttgtttatataaatgatatataattacatattaaacatagcttttatacatttaataaagtatgtaaaatctatgtaaaaagtaagaaatataaacatttttttaattatattttaaaaatatcaagcaagttttcttcacaaatgaataaaaaatgttataatatgattaaagaaaaagataaataattagcaagatttgtttagctaaaattaacaagggagcgataaattatgggtataacattatcaaaaggccaaaaggttgatttaactaaaggaaatccaggtcttaaaaatattttagtaggtttaggatgggatactaacaagtatgatggtggatttgactttgatttagatacagcagcatttttaacaggagcaagtggaagtgttactaatgatggagattttgtattttacaacaatttaaaacatacatctggagcagttgagcatctaggagataacagaactggcgaaggtgatggagatgatgaacaaatagttgttgatttatctaagattcctggagaaataagcaagatttcttttactgttacaattcatgatgcgacagaaagaagacaaaattttggacaagtaagtaattcttatataagaatagtagataaagacacaaatgaagagttaataaagtatgaattaggagaagattttagtatagaaacagctatagtagtagctgaaatatataagcacaatggagaatggaagtttaatgcactaggttctggttttgaaggtggtcttgctgcattatgtggaaactttggaataaacttataatttcaactataacaataaactaaagggggatattttccatggctatagtattaaaaaaaggacaaaaaatcgatttaactaagggaaatccaggtcttaaaaatataaaacttggactaggatgggatacaaattcatttgatagtggctatgattatgatttagatgtaagtgttttcatggttggagaatctcaaagagttgaaaaagatgaagattttatattctacaataacttaagacatccatctggagcagttgaacacttaggtgataatagaactggtgaaggtgatggagatgatgaggaaatattagtgaatttagagacaatgccaaagcatatacaaaagatagctgtaacagttacaatatatgaggctgctgaaagaagacaaaattttggacaagtaagcaactcatatataagagtattaaattctgaaaatgatgaagaaatattaagatatgacttaggtgaagaatttagtatagaaactgcaattacagtatgtgagatatataagtataatggagaatggaagtttagtgcagttggagcaggatttgaaggtggcttagaagcactttgtagaaactatggcttaaatgtttaatttaagcaatataatatattaaatataaataacctatacaaataatgtataggttatattatataaaattttgtggaggtttagtatgtcgattaatttatcaaaaggtgataaaatagatttaaaaaaatctaacccaggactgagtaacatacttgtaggtctaggatgggaccctgtgcaacaatctggaggaggtttttttaaatcgttatttggtggaggacaagctgatatagattgtgatgcatctgtatttatgcttaatcaagaaggtaaattaagtggaataaaagatttaatttattttggaaatctaaaaagtgcctgtaaatcagttttgcatacaggagacaatctaactggtgagggtacaggtgatgatgaacaaatcctagttaatttggataaagttccatcaaatattcataaattattgtttgtagtaaatatatacaattgtgtagatagaaaacaacactttggaatgatagaaaatgcctatataagagttgaagaccaaggtaataagaaagagatagcaaaatacaatctatctgataattattctgaaaaaactactcttatagtaggagctatatatagaaaagatggaagttggcaatttaaagcaattggtgaaggaacaaaagatgcgggtcttaaagaagtaatgcaaaatttagacaggattgagtgtgcatatggaatttaataatgatatcaaatattataatgtagataaagaagaagttacaaaagacttatctgttaatcctgaaaaaggtttatcagaatcagaagtcaagactagaagagaaaaatatggtttgaatgaatttactccaaaagaagagggtagtttttgggatgatttaaaagaaagtttaagtgaaccaatgatagttatcttgattattgcagcagtagtaagtgcagtaattggggaaactcatgatgcaatagggattgtaggtgctatagcaataggtatagcaataggtatgattacagaaggtcgttctaagaaagcagcagaggctctttctaagttgactgaaaacatagaagtaaaagtattgagagatggggaagtacatcaaatttctaagagtgaattggtaccaggtgatatagtatatattgaaactggtgacatggtacctgctgatggtagacttatagaaagtataaaccttaaaattagagaagatatgttaacaggagaatctgatgacgtatctaaaaagtgtgatgtagtagtttctatggaagagatagaatctaaaggagcagtagtagtacaggagccaatacctgcaaaacagataaatatggtgtttggtggtacacttgtagcttatggtagaggagctctagttgtaacttcaattggagataatagtgaaatgggtaaaattgctcaaaacttatcagaaacagatgagcaaactccacttcagataaaacttggaaatttaggtggtttgatagccaaagtttctagtgcagtagcaggattactatttatatttatggttttccaaatgataagtaagaatgtattaaatgtagatatgtctggaatattaccgtttttagaatcaatagacccagttaaaacagcatttacagtatgtgttgcgttgatagttgcagcagtgccagaaggtcttccaactatgataaatatgacacttgcaataacaatgcaaaaaatggctaaaataaatgcattggttaccaaaaaagaagcttgtgaaacgataggttctgtttctgtaatatgttcagataaaactggtacattaactgaaaatagaatgactgtagaagttgcatatgttgatggcagatatattgaaagttcagaagaggaaataaatagttattttgaagaaaactgtatgataaactctacagctgatgtagagcacaatgatggtgatattaagtatttaggaagtgctactgaatgtgcattgcttttatattacaaaaacgtagattatagacaagttagaaaaaattctaatatagtagctcaaaatccttttacttcagattcaaagagaatgacttctgttataggtcaagataatcatcatgtactattatcaaaaggagcaccagaagtcttacttgaattatgttcacatattcaaagaggaaaagacatagttccattaactgaaaatataaaacatgagattttagaagaaataaagaaattgcaaataaaatcaatgagaactttagggtttgcatataaagaaatctcacaagctgaagaagaagcagcagtaactgctgaaagtgatgctatgaatgtaagtgcaatggaaaataatttagtatttagtggttttgttggtataagagacccacttagaaaagatgttatagagtctgtaaatacagcaaataaagctggtgtttctgtaaaaatgcttacaggagataatataaatacggcaagagctataggtgaagagttaggcctattaaaaaataatatgagagtggttgaagcttcatatatagatactttagatgatgaagaattaaaacaagagatacaaagtatttcaatcgtggcaagaagtaaaccagatagtaaaatgagaatagtttcagctctgcaaaagagcggggatgttgttgcagtaacaggtgatggtataaatgatgctccagcactttcaaaagcagatgttggtatagcaatgggtatatctggtacagaggtatctaaaaacgcagcagacataattttaactgatgatagttttagtaccattgtaaaaggtattaaatggggtagaggaatttatgataacttccaaagattcgttcaattccaattaactgtaaatgtaattgcatttttagtggctataatatctcaagttatgggacaagagatgccatttactacaatacaattattatgggtaaacataattatggatggaccaccagcactagcattaggtttagagccagttagagaccatgtgttaaatagaaaacctgttgatagaaaagccaatataatttctaagtcaatggtgtatacaatagtattaaatgcattttatataacagcaatactaatgttacaatctacatttaatttcttaggagttgatgaagctcataagggaacagtaatgtttgcgttatttgcttttagcgcactgtttaatgcatttaactgtagagagtttaatgcagatagtatcttccctaattttacacataacaaattagcactacaaataatagtgttgacaggaattgcacaagtaatatttactcagctattccaagatttctttaactctgtagcaatggattttatgacatgggtaaaagttttatgtgtagcagcaagtgtaattgtggttaatgaagttgtaaaatgtataataagactggtaaaaccaaaaaagactgcttaaaacaaattttttagaagaaaacagactgactcaaaatatgaattttgggtcagttctgaataaacatttaaattgggaggatagttatgggtgactcaaaggtatttgaaaaaatattctccagccaatcagatagaggaaattacactccttcaaagggatatctaagttattttatttcgtatattggtttagaagatgaagttttgtacaatctcgagatatttaagacaaaacaaaatattgatagcaaaaaagatattgctttatttactgatgttatagcaaatcctagtgattttgatattataaattattttaaaagtggacttcaaaaatatagaactagcatggaagatgtagatataaatattttgggatttgaagagattgattataaaataaagcaagcaatggatagagtgttaaaagaagaggaaaaagaatttactaatgatagagttaaacaaaattttatagtgaaaataatggcatggataaaaatttatatcggtgctttagatataaataaaaatgaagctccaaaagtaatattttatggagatataaaaaaacatgaagtttatttactcttaatattatacttggcaggttttgatgttttatatcttaatccaaattcaaagagtaatatagatattttaaaatcagaaagatacaatatagagtttgaagaagccaacataatagaagaaaaaatttcttttgaagaaagggttattttaggggaaaaaatagataaaagttctgtaaaaaaagcttttactgttggggcagaagcatcaaagcgtataagtgaggaattgttaaatgatgcaggatttataaaaccttggcaactccaagatagaaaaataaaaaatctacttctaagttcaactgttgatgaaatatcaatatactggaatcaaccacttaaattaagaccaggatttaagtttaatgatgctattgtagaagctccaaattttctttctaagattaatggaatatataatgataagaatgaatatattaagtttttagatttattaagagattcggaaagttcaacatttattgaatttaatggagatgtagatagattttcaaaagcttttacgagagaagcttttagtttatcctttttattggattcaaaaggtgtaatagataaaaactctgttttaaataataaagattattccatatcaacactagcacttaatcaacaaattatgattttagagaaagtggaagagttgttagaaggaagtatgtttttgaatggtttaagtggagaagacaagataaaaggtctatttacagtacttcacatggataagaaatttgttcatatgatgaacaatttcgattactcacttataaacccaaaattgattatatacatgtacaagagtattgtatttgataaagaaatagtttttcttatgcttttacttagtaagattggatttgatattatcatattatgtccaggaggagaaaacaatatagagaatgttataaataaccaattgattgatatacacagattggataaaatggtatatgaccttaaattaaattcgcttgaaaatgatatacctttacttaaaaaaatttttggaaagaggagacgattttagatggggataaatataaatagtttttcaaaagataagaactctgtagaggttactgagaatttgcctacagcagttcaagaagaaaacttcgatataatggaatatacaaataataaaaaaaatgaactgagaaagtctaaggaagttgaggcattgacatcccttatagaagtagaaaatccagatacgattttacagtttggtaggaaagcatctgaaggagtagcaagagtttctgatagccttttaaatacaataaaattaaatagaaatgaagaaaattctaaaatgctggttcatttaactaaaataatggataagtttgatttagacgattttcaagaaactaaggaaccaaatttcgttcaaaaacttttcaaaaaagctaataatgccattgaaatgatgtttcaaaagtatgaaacattgggaggagaagttgagaaaattcaaattgagcttgagcaatacgaaagagatatagcactttctaataagcaaataggtgctatgttaaatgaaaactttgagttttataatgaacttcaaaaatatattgttgctggagaaatggcaatagaagaaatggataatgaaatactacctttctttaaacaaaaatcagagactagtggagaccaaatggatgttgtcaattatcaagaactattaaaagtttatgatatgttaaatcaaagagtctatgatttaagaatagcagaaaatatagctatccaaacaatacctatgcttagaggtatgcaacataataattatggtttaattagaaaaataaatagtgcatttgtcgtaactttaccagtatttaaacaatgtttatctcaagctatattacttaaaaagcaagaattacaagcaaaatctctaaaagcacttgatgacaaaactaatgaattattgcttagaaatgcacaaaatgtaagtactcaaagtgcacaaatagctagaatggctggaacaagttctgttcaaatagaaacattggaaaaaatgtacaatactatcaagtctggtatagatgaaactatgagaatagaagaaaacaatagagctttaattaaggataatacaaagagattggaagaattaaatacgactataatttataataagtagtattatattaagggctaatttgtataaagttggccctttctatgtatatgaggaggctagacattgaaatatttcgattatatctgcaaagatgatttggagagaatttttttgaaggagccagaagactttagtgctaagactgaaaaagatgtgttgaaatatgcactgggcgcttttttatacgttccagctactcaatataatatgatttataagagtattataggggatgttaagggagttagaccattagctatttgtttagaagatgctgttggagtaaatggagagttagaggctatagaaaatcttagattaattttaaaaaatattagcaatgaaagtataactaataaagatggaataccactaatttttgtaagaataaaagatgtggagcaactgttgagaattaaagagattataattaaaaatagtcattctataacaggaatattaattcctaaagcaaattcggagttgattgaaaattgtatagaagctttatattctatgaatcttcaagatatgtatgttattccaataatagagacaagagaatttatatataatgaaaaaaaagaacttagttttactaatttgtacaatgctattttaagacataagtcaagaatattaagcattagagtaggcataactgatatattagggatgtatggtataaggagagataaaaacttctctatatataataatttgatttgttcttcatttatattagatataatcacatatcttcaaagaccagagttagatatacctataagtggtggagtatcagaattttttgatatgacaaataaggatataagaaataagtatatagaagaaatattattggataaatatcatggattaattggaaagaccgtaattcatccaatgcaaattcaaattgtacaagcgctatctacagtatcatatgaagattttactgatgctttggatatactggatagtacagacagtaagtatggtgtgagcaagggtgtattaggagagagaatgaatgaaacaaatccacattttttatgggctaaaaaaacattgattctatctaaaatatatggtgtattaaataaaggagtagactatgaagaattgcttaaattttaattgtgagattgacattattgataatccattgaatttagaactaaatgattttttagacgtaggagtaagaaataatagcaaaagacgttttttgtttatctcaaagaaactcggtaaacatttagcatgtaagccaagtgagatggataatttgggaaaattaatggctacaatttataatgaaaaaaataaggaagaatcaaatggtactgttatagcttttgctgaaactggtacagctgttgggcatagtttttttgattacttatgtggagattatgaatttattcatactactagagagcagtttgacgagttagaaaatctggaatttttagaggaacattcccatgcaacagaccagaatttatactttggtatgcttaacaactttaaatttggagatgagataatattggttgatgatgagattaccacagccaatacatgcatgaatataattaggaaaattcaaagcatttatcctaaaaagaaatacactatatgctcaatactcaattgggtaagtgatgaaaatttaagtaaagttactcgtttagaaagagagctaaattgtaagatagattttgtatacttatttaaaggaaactttaaattttatatagatgaagatattatttcaaattacaacgataattatagtattactaaattagagactatttcaagtgataaagtaaatttagtagtaaatcatatttatgttgatttagaagattatattggaaataagaaatatgtaaaatatacaggaagatttggaattaatagaagagaacaatttagattaaaagaaatcgttaagagagaaagtaaaaaaataactatggccagtaaagaatctttaaaaaatgaaaaagaaaagattctatttttaggtactgaagaatttatgtatatacctatgctgtttgcaaaagaaaaagaaaatcaatatgatatatactatcattcaacaacaagaagtccaattattaatattgataagaagcattatcctattaaaagtaaatttatgctaaagagtttttataatatagatattcaaaattatatttacaatatagataaacataatttttctaagtgttatttatttgtagagctgaataaaagtgaaaattcttatctagaatttattgatataattaaaaaaacaagtataaaagaattaactatagtatgttgtagctaaagtgttttaacaggataaaatatatcacgattttaagataggagttgagtcatatgagagattttagcacgtattctaaagatgatgttatttttttattaaaagatatatcaaatttaattgaagaagaaggaaataaagaaagagaattaaaaatacaaaatggtagacattattcagaaatgataccaatagagtatgaagttagtgaagattatctgaatttatatcatgagaaactaagagaaaataaagataagcttgcattttctataggagttatgtgtgaaaaaataattaaaaaaaatggaaatgatgtagtactagtttcacttgctagagcaggaacacctattggtattttggcaaaaagatatataagaagcaagtataatgtaagtttacctcactatacaatctctataataagagataagggaatagatatgaatgcaattgaatatatagtaaagaatcatccgagctcaaaaattcaatttttagatggatggactggtaagggaactatatcaaaagaacttgaaaaagcatgtgatgaacttaatgttaaatttaaaaaacattttgactcaacacttgctgtattagctgaccctgctggatattcaggactttatggaattagagaagatttcttaataccaagtgcatgtttaaattcaaccgtttctggtttagtaagtagaactgtactaagagaggatttaattggtaaaaatgactttcatggagctaagttttatagacatttaaaagataaagatgaatctatgaactatatcgaaactatagaagaatgttttaaaaatcaatttaagaatatatctgatgaagttgaaaactgggaaagtgacattataacaagagatggatactttgatgttttaaatataaaagaaaagtataacataacagatattaactttatcaaaccaggtgtaggggaaacgacaagggttttacttagaagagttccgtataagattcttgttaaagacttaaatgataaatctttagaccatatattcatattagctaaggagaaaaatgttgaagttgaacaaatggatttaaaagcctataaatgttgtggaataataaaaaatatgaaagatatttaggaaatatattagacaggagaatattgaatgattgttttttcagatttagacaggagtatcatttactccaataaatttttaaatgctgatagtaaatatgctaatatagaaatttatagggaaaaagaaatatcttatatatctttagatactataaatttaataaagcaaatacaatattatggtatgtttatacctacaactactagaacagtggagcaatttaagcgtatagaatttaataaatatgggatttattttccttggagtataacttcaaatggaggagttatacttaaagataatgaaatattgaaatcatggagtgaaaaaatagataaactaaaacctgattatgagcccattgaaagtatgattcataaatttaaagactatttgaatgtagatggaataactaattttaaagttgcagaagatacatttttttatatagttgttgatttctcaagatttaatttggattcaatcaaagaatatacaaatatattggaatcaaaaaattggaagttttatgtgagtggcagaaaaatatattttataccaaaagaaatttcaaaagaaaatgctataaaatacttgactaaagaattaggaatagaatatttttatgcagttggagattctattatggactatggtatgcttaatatctcaaataaatcctatgtattgaagcatggtgatataaataaaaatgaaatagaaaattcatttatatcaagttctttcaaaggaatgagtggaactgaagagatattatctaacattttagacgagaactgcctacttaatatataatgactgatatataaataataaactagaaaaatctgaaataaattatagtaaagtttatcatactaatttatttcagatttttatcaatttatatttaagtaagaactcaatatgttaaaatgaaggtggagtcattgcccagactgagatacatacctcatcatcataattttcatacacatgtggtatagtactgttaaaataaaaactatctccttcctccaatagatattccttatttccaagtgttatcttcattttaccttttattatatagccacattcttctccttcgtgtgtcacaaattcactgtttttttgtgtatgaccatctagcgtaacaagtataaattctatttttttcccagataaattaggaacaagaagttcataaaattttgtagaatcattagttactattttttttcgattatttttctttactactatatcagagtcctctcttccaatctcttcaaaaaaataacctatatttatatcaagagcttttgatattttccacattgctacaatagatggaacaaccatattacgctcaatttgacttattaagcctgtacttaaatctgaattttttgctaaagtagagatacttatatttttagattttctaagagatctaattttgcttccgacatctatattcattagatacaaaccccctcagacatgattataacatataatttataaagattaataaaataaaaaaaagttttataatgcatgtattttttatgttatattgaattttctgaaaagatgcattataatagtattaatattcaatatattgaatattgataatgatattttaatttaatgaaatggaggtaattaagatgaagagttttgtaagtcctgataatatttgggtattatgggcagttgtaactggatgggcagcatttagtatttacttggaacaaaagtacaattgggcatcaaaagtgtcgggagcaataatagctcttgtaggagcaatgttattatcaaatctaaatattataccagtagagtctgttgtatatgaccaagtatggggatatgttgttcctttagccatagctttattgttatatcaatgtaatattaaaaagatatggaaagaaagtggaagattgctcattatatttcttgtaggttctgtaggaactgtacttggagctatgattggatttttagcattaaaaaatgtagtaccagatttaaatattgttgcagctatgatgacaggttcttatataggtggaaatgtaaactttgctgctatgtcaggggcgtttgatgcgccaggagaattagtatcagcaacagttgtagcagataatcttttaatggcattatatttctttgtcttaatagctataccatcaattggattttttagaaaacattttaaacatccacatgtagatgaaatggaaagtataggtataactgaaggagaaacagtagcagcaaattattggggaagaaaagaaatatctttaaaagatatagcaatagccattggtagcgcctttataattgtcgcagtatctgtagaactatcaacttggtttaaagctataataccattatcaaatccttttttagcaatgttaaatactttatttggaaatcaatatctaataataactactttgactatgttgtttgccacatttatgcctaatttctttggtgatataaaaggagcacaggaattgggtacatttttaatatatatattctttgttgtagtaggtgttcctgcttcaataacattaataattcaaaaatcaccattactacttttatactgcggaataatggtactaataaacatgctagttacatttatagttgcaaaaatatttaagtttagtttagaagaagctattcttgcatctaatgcaaatattggtggtcctacaacagcagcagctatggcaatatcaaaaggatggtctaagctagtagggccaatacttatagttggaacatttggatacatagttggtaattattttggtcttttagtaggaaatattttgatataattttacgtgaaaagaagttgttttttagaaagatttttatttaattggaggttgttatgattttcgatggacattcagatacttgggcagatgtaacaataagaaggcttaacggggaaaaagatgtatttagaagaatccatcttgataattttaaaagagcaaatatagaaggagctatttttgtaatatggatagacccaccatatgataaagagcctgaaaaaagagttaaacaaattataagctctataaaagatgaaattgaagatatgaaagatgttgtaaacatagtaaaaaaatattcagatatagataaaggtataagtgaaaacaaaataaatattttaattggtcttgaaggattaagccatattggaagaaatatagatttactagattatttttataaagaagttggtgcaagacatgcatcattaacttggaatgaacagaatgaacttgctacaggatgtttaggggatgaaaatcgtggtttaactgaaataggtaaaaaagcagtcaataaaatggaaaaattgggcatgatagtagatgtgtcacatttaaatgaaaaatcattttgggatttaatgtctgttgcaagtaagccagttatagcttctcattctaatgctaggagtttatgtgatgctaaaagaaatcttacagataatcaattaaaagaaatttcaaatacaggtggattagttggaataaatagttttagaggatttactaatagtaatcctaagaagcaagatttaatacatttggttgaccatatagactatatggtaaatcttataggtatagaacatgtatcttttggttttgattttagtgattacttagggaaagagactataggttcttttactggaaatgctagtgtgccaagtgtagatggtcttgaaagcacacatacagcacagaacatagtagtagagcttgaaaatagaggttataaaaagaaagatatagagttaatctctagtggtaatttttataggctctttaaagatatactaaaataatataataaagaacttaaatttataaaatagtatatttatacaataatatctacatatttaaattggcgttcataatttattaaattaaattttaatgttactagaagtttcaattctagtaacattttttatgttaaaaatagatatagatatatattgacaatgataattattattgataaactataaaagtgaaaatgataataattttcattttaattaataaaagatttttaaggagggagaatgaagaaaaggtatttagtcataggaataataattttgtcttatttttctttatttataggagctgaagatataaatataatgcatatatttgcaaaaaatcagcataagcttatgatatttatcatgagtagggtaccaagattaataagtatattgattgctggtgtaggaatgagcatagcaggtcttataatgcaacagataagtaagaataaatttgtatcacctacaacaggtgctacaatagatgcagctcaatttgggatagtaatatgtatgcttttagtaccaactgcctctatttttacaaagacaataatagcatttgtattttctcttgtagggacttttacgtttatgaaaataatagggaagttacaatttaaaaatataatctttgtaccattagtaggtataatgtttggaaatataataggttctatgacggattttatcgcgtataaatacgatttgagtcaaaatgttagttcttggatgcaaggtgacttttctatgatacttaaaggaaattatgagatattatatatcacaataccccttataatattagcatatatttatgcaaataaatttactgttgttggtatgggtatggattttgcgacaaacttaggtcttagttacaaaagaattgtcaatataggtctgataatagtagcacttgttacagtatgtgtagtcgttacagctggtaatatcccttttataggtctaatagttcccaatatcgtatccttgtatatgggtgataatataagagcaagcatatggtatactggtttacttggagcggtatttgtacttatatgtgatatttttggaagaattattatttatccatatgaaatatctataggacttacagttggagttataggaagtatactattcctttatttaatattaaggaggaatgtgaatgaagcttagtctcaatcaaaaaatttactttgtaagtatattactattcatatcaatagcactttttataatttatggaatagacatgaatcatttagaatatgcattatcacaaagaataccaaaaatatttgctatggtattaggtggaggatgtatagcatttactactgtagtgtttcaaacaattacaaacaatcaaatattaacaccaagtgtactaggtttagattcattgtatgtaatgattcaaactataatagtattcatatttggttcaagcagtagtctgattataaatgaaaattataattttattattaatgtagctatgatgattggagcttcattgttattatataagatgttatttgaaaaaaataaaaataatattttctttttaatcctagtaggtatgatatttggaaccttatttaaaagtgcaacaacatttattcaagtaatgatagacccgaatgaatttttagctttacaaactagtataatggcaagtttaaacaatataaacactaatgtattgttaatagcatttataataattattgccataataccttttatatatgatgaaataaagtatttagatgtattgtcgttaggtaaagaacaagcaattaatttaggtgtagattttgataaggcagttaaaaaaatgataatattaatagcaattttagtctcaatatcaacagcacttattggacctatgacatttttaggacttttacttgctaatataacaagagaaatttttaaaacatataagcatacatacttgatttcgggttctatgttgatagggatgattacattgataataggtcaattttttatacaacatgtatttaagtttgatacgactttaagtgtagtaataaattttataggaggaatttactttattcaattactattaaagggggcaaatagatgatagagataaaaaatatatttaaaagatataagaataaaaatgttgtagatgatgtctcttttagtatagaaaagggaaagataacatcttttataggaccaaatggagctggaaaaagtacagtactatcaatagttacaaggcttataggaggtgatggcggagaagtaataatagaaggaaaaagcttgactaattatagcaataaagaattagcaaaaaaaatagctattcttaaacaatctaacaatataactttaaagcttacaataagagaattagttggatttggaagatttccatatagtgaaggtaatctaactaaagaggatgaaaattatattgatgaagcaatagaatatatgaagttgactgatatacaacataagtatttagatgaattgagtggaggtcaaagacaaagagcttatatagcaatggtaatagctcaagatacagagtacatattacttgatgaaccactgaacaatttggatatgaaccattccgtacagatgatgaaggtacttagaagtctttgtgatgagttagataagactatagtattagtaatgcatgatataaattttgcatcatgttattcagataatatagttgcattaaaaaatggaaaagttgaaaaagtaggtcgtacagatgagatagtaaatgaaaaagttttagaagatatttatgagatgaattttaacattaagaatataaatggaaatcgaatctgtatttatttttaaaatattgtatatgaaaataagcttgctatatgattttttataaagtttttaaattaaaataaagattaataggagagaggaaaatattgatatgaataaaaaagcagcaatagtagcagcagtagctattataggattagtgacagtgtttgcattaggtggaagtaaaaagaatgaatcaaaaacatcagaaaattcaaataataccataaagataactcataacttgggagaaacagatgtaaaattaaatcctaaaaaagtagtagtatttgattattcggctttagatacaatggatgcattaggtgtagctgagaatttagtaggacttccaaaaacgagtttaccagcatctttagaaaaatataaggataagaagtatgcagatttaggaggtttaaaagaaccagatttagaaggtataaagtcggcaaatccagatttaattataataaatggaagacaagaagatttttatgaacaattgtcaaaaatagcaccaacaataagtacaagtaaagatgataagaagtacttagaatctgttaaaaataatatagacaaaatagcaaaaatatttggagtagaagaaaaagcaaatcaagaatttagtaaaattgaaaagaaaatagaaactttgaataaaaaagtaacagataaaaatttaaatgctttaactataatggtaaatgaaggtaatttaagtgtatttggtgaagaatcaagatttagtatattatacaatagttttggatttgaaaataaagataaaaatataaaagaatcaagtcatggacaaaatattacttttgaatatatagctaaacaaaatccagaagttatgttcgttatagatagaggaatagctactggtagtgatgtaaaagaaagctcaactgcaaaatctgttttgaacaatgatataataaaatctatggatgcatataagaatgataatataatatatttagattcaccaacatggtatgtaaatgatggtggtctaacatctttaaataaaatgatagatgatgcttcaaaagcggtaaattaataatccgatataatcaaaatgtattttttgtaaaatgattatcaaataaactaggagtttttaagaactcctagtttattttttgcataataaagatatagtttaaacaataatattatttataataagataaatctattcaaaatctaataaaatatgaagttatactagacaaaaagaataactcttaaatataattaagttatataataatatataattataatgatataattttaataggaggtttgtaattaaaaagtatataaattatattaatagtaataatctataagaacttatatattagaaaaaaatttttgtatatataaaggactctaaagatgaactatataaaacaaggtttatatattctaatagtatagaaaattttattgtaaacgcatgtatattattagaaaaaatagtttgaaggtattcaataaacataaaaaacaatataggggataaaggtgttttatgaagagatttttgaggagaattatcttagttttatttattttgttgatttttataagttttatttctattaaattaattcataatgttggagattatggaaaattgattaattatgttgggattgtttgtggagctagccaacgtctaactaaactagagatgaatcatcaaccaaatgatgaattaatagaatatattgatgaaatcctacaggagttgattacagggcatggagattatggtttagtaatcactgattgtaatgaatacaatgaggacttacttttattagaaaaaaagtgggaagatttaaatattgaaattaaaaaagtaagaatgaaagaacagaataaccagttattaagtataagtgaagagtttttttctcttgcaaatgatacagtgtttaaaatagaaaacttttctaaagaaaaaagtaattacttaatgactttaataataattatatctattataggtatattagcatgtatcatattgattttacaatatagtaaaaaaatggttagactggaaaaattaaatgtagatttaaaaaatattgcatataaagatgaactaacaggagtaaatactatagaaaaatttaaattggatgcaaatcaaaatatttgtataaataaggataagaaatttgctgtattctatattgattttgaaaactttaaatacattaatgatatatttggatatgattatggtgacatgatactgaaaagatatgctaatcttatgatgaatgacatagggaaatatgaaatatttgcaagagaaattgcagatagatttgttgcgttaagatgctatgtagataaggaagatttagtagtaagacaacgagatgtagacaatgaactaattaatataacaaatgaaattaaaaataaacatagtattactgttgtcagtggaatttgttgcattgaagatgtaaatgaaaaattaagtatagatggtttaataaatagagcaaattttgcacaaaaaactgttaagaataaaccaggtactaattatgctttttataatgacagtattcgtaaaaaaatgattgaagaaaatactatcaagagtagaatacatgaagctattgaaaaaagagaatttatagtttatttacagcctaaagttaatttacatagtcaaaaaataaattgtgcagaagctttagttcgttggcttactccggataaaggtattatatctccagcaatatttattccagtacttgagaagaatttttttattgccttagtagataagtatgtttttgaggaggtttgtaaatggattagaaagaggttagatgaaaataaaccttttgttcagatatcagttaatgtttcaagaatacaattttataacactaaatttgtagaaacttattccaatatacaaaataaatacaggatacctaaaaatactatagaaattgaatttacagagagtgttgcttttgagaatcaaaaacatcttttggaaattatacatgatttgcatgaaaatggatttacttgttctttagatgattttggaaaaggttattcgtctttaagtgttttaaaagatttaccatttgatgttttaaagcttgactctatgtttttcaaggctagtttagataaagataaagagaaaatagtaataaaaaatattgtacatatgttaaaagagcttaatatcacaactgttgctgagggcattgaatgcaaggaacaagttgaatttcttagggatattgggtgtgatttagttcagggatttgtattttataaaccaatgccaatattagaatttgaagaaatattggataaagagtttgtttataatagctaaaatgtactttataaaatatgaactaattaagtaaaattattttgtactgaataaatttttactttatttacagaatagtgattatttacagaaaagggcgaaaagtgtattcctttaagtatgggatggatagcacaaataggggagaaaaaatattggccatataagaatgcataataatataaatatttgaaaggtcagcattatataaaaattaaaaagaaaataaataatttttctataaaaaagagactatgagaaaagttactcatagtctcctaaataatgtatttattttcttcctgcaacccattttaagccccaatgaaattcagtatccatttctctatgacctttgaagtatttaactactttttcaacactgaatgtctcatcatttacattttctatcaatgctattgaacacatattatagccatttttatgttcatcaagtttgacaactaagtctgaatcttgtttttgtttgattgttacaattccatcagcttcagaccagttagctacaccttcgtatataaaagcataaataagtattctttttatatcttttattttattaccatttattcttaaattttctccttgtgtattacttcctgttctgtcatctccatctaattgagcaaaaggtggattgtctaaactaccaaaagcatttcctaatgcttgaacagcaccttttacaccatttttcatctcaaataggcaacccaaatctaaatctatattactgcttcttaaagagccaaaaaaaccctttttttgtactttttgattccaatttaaattaactaagatttcacctaaatcgctattttccttttttgtaaggtttattttttgtcccttttttaattctatagccatagtaatcttcctccacaaacatagatttatttaaatggtagcacttaataagtcaatattcaacaagattagaataataatattaaaactatactaaatatactaaaaagtaggaatcacaatacctttgtatttttcttcaattaagcttcttgctttatctgatgtaagaacatcttgtagaactttaatcttttcactgtctttatcttcagttctaaatgctaaaagatttgcatactcgtcatttataggagctgtataaattccgtttttcttggcatcaagaccagcaggtacagcataagtagtatctataaatgcagcagtaacatctggaagagaagatggaatttgagcaatatctaactctttgaattgtattccctttggattttctattatgtccttaggactaactaatccatcccctttaggtaacgttaaaagtccaatactttcaaggtatctaaggttcttagagcaagaagatgggttattgcttattgcaattgtatctccttttttaaattcatcaacagattttatcttataagagtaaagtattgctgggcatacatatagttttttaccagccattattttgtaacctttggccttaacagcttcttttagataaggttcatgttgaaatagatttgcatcaatttcaccattatttaaagcttcgtttggaagtatgtaatcatcaaagtttttaacttctaaagtatatcctttttctttaataagtggttttaattcttctaataactctcctcctggaactaaagtagcaccaacaacaatttttttatcatctttagctttagaacatccaaccacagctaaagttagtactagacataataacaaacataataattttttgaatttcatataaattccctcctgaatataattgattagttaaaaataaaataccattctttatcacactgcaaaataaaaataagcctgagtttaaactcaggctttaaaagctaatttagactcatctttcagtataatactgcaggatttagcaccaatgtatataaaaatatactggttgctgggtttcatagggccagtcccttcaccactctggataagaagtatcaatttttaattatgttataaatattatcatgattttttacgtctgtaaacataattttataaatattttaaaatctttaatgtattttatttaacacctaaaattccagaaactagaatatcagtatcagcacctaagaaatagtcatttatttcaatagaatccagagtatttctcaaagcattttcttcatgccttataccaataagtttattttctacaaatgcaacatcacattttccaaaaaaatctccaaaaaattttatactagttattatgcctttatcaacatttaaattaaactcaacatttccaccagaatattttaattcatttgaaagagtatattttggtgaattaccaaaattccaatcccaagtttcgtattttgatttagtaagcttttctatttgttttatatcatgctcattcaaacaataattagtattatcagtatttgttttagaaagataatccattatagcatctttaaattctaatatgtccatttttgaatgtaaatgttcacttatattggttacacgagattttacagattttattccttttccttcaaattttataggtttaacctttaatgcttttgagaggtcatttatttcagatgaaaataaaagagtaccatgatgcattactttgtttttgtagttgtattgagcatttccagaaaatttcttgccatctataagaaggtcatttcttccagaaaattcggcattgacatctagtgttttaagtaaatctattatgggctgagtgaatcttctgaaatcactaaaattattattgttacaagctataaatgtaaaatttatatttcccaaatcatgaaatacagctccaccaccagactgtctcctaacgacaggtatagaatattcttttatatattctaaatttatttcagaaagtgtgttttggttttttccaacaattatagaaggttcattcctccataaaataaataagtcttcatcaaaattttttagaagatattcttccattgctaaattaaaataagggtttgttttttcattataaattaataacattaaagtagttcctccatagaattgataaaatttttattatgaatacaattaattttataattcgacaataatataaaaactcctttaaattagaaattttaaaaactaccttgcaaagtttaaataaataatatatactcaaaatatgtttaataaaagtgaatagaagggtagaggcgcaataatctatcagtactaataaggagttaagcacagagagttattaggaaaggagatattgccgaagttttataatcgatgctttaagattatattgctgggggtacatagaaaatatgtacaactgtcacaggtttatttgtggtgagctatcatttaaggaattatattatatttatttttactattgttgatatattgtaatgtttaagccttgagtgtttaccactcaaggcttttttagttttattgtaacataataccctgtacagttcacaaaattaaaaggagagggagatttatatgaggaacaaaaaaattaatattatttttctgacgacaatcatgttcataatgtcaacagtaatggtttttgcagaagaagatatagacactattgcactagctaatgcagaaaaatttgggattttaactttaataccaccattagttgctataatacttgcatttataactaaaaacgtaataatttctttacttataggtattctttctggtagttttataattaaagctagtggtattaatgtttttgcgacatttatacaggcatttttagatttagtagatagagctttagtatctttagcagacccttggaatgcagggataatactacaggttttggcaattggaggagtaataaatcttgttgctaaaatgggaggagctaaagctatagctgaagcacttgctaaaagagcaaagtcagcaaaagggacacagcttataacatggtttttggggcttttagtattctttgatgattatgccaattcactaatagtaggtcctatgatgagacctgttgcagataaaatgaaaatatcaagagaaaagctagcatttataatagatgccacagcagcaccagttgctggtttagctataatatctacatggataggtcttgaggttggtttaatacatgatgcttttgaaagtataagtatagatgtagatgcatttggtatatttttaaatacaataccatttagattttacaatatattaatattagctttcattgtaatatcagcattattattaaaagaatttggtccaatgagaaaagctgagataaaatctagaagtagaaaaattagtatagaccttgatgaaggcgtagaagagttggatgatttagctccaaaaaatggagtaaaattgagtgtatggaatgctataatcccaataggaacattgataatagttgcattagcatcattttattatagtggatatacatctataatgggaggagacgataaggctctgatacaactatttacaaattctccatattcttttgaagcaataaaagaagcatttagtgcatctgatgcatctagagcattatttcagtctgcacttgttgcaagtttagttgctattataatggctgtagtaaaaaagatttttacaatatcagaagcaattgatgtttggatagatggaatgaaaagtttagtaatcactggtgtaatattaatacttgcatggtcattaagttcagtaataaaagagttaggtacagctaagtttttaatacacctattatcaggttcactaccaccattcttattaccaagtttaatatttggtttaggagcaataatatcttttgctactggaacagcttatggaacaatgggtatacttatgccacttgcaattccattagcatactcattaaatcctgatatgtcttatgtaatagtaagtactagtgcagttttaacaggtgcaatatttggagaccattgttctccaatttcagatacaacaatactttcttcaatgggagctggctgtaatcatatagaccatgttaacactcaaatgccatatgctatatttacagcagtaatcactattgtatttgggtatataccagctggacttggattgccaatatatatagtattaccagtggcaatagctgctatatttgtaggtattcaaataattggtaagaaagttgatgaagcggaaatagaacttgtagaataaagatataaataagtttcaccttttattatcactattttgttagtttttagataattttaaaaagttattgaaaataatggcgaaatatagtaaaataaaagagtgataagcggatgtggcggaattggcagacgcactagacttaggatctagcgccattggcgtgggggttcgactcccttcatccgcactttacagtacttaattgtactgaaaaaaactggggttgctggctttcggagtgggctatcccgtttttatttttttgtatatataatagattggcactttagtataaggtgctttttttataggcaaaaacagtacatttatttctgttttattatcattcatctattagaatatactttatttaagaatgtgttaataagcagtgttcacattcttgataaaatgtggaataatatgcctaccaataagcatttggtgtataagtaagagtatttatatagttgattgtgaaatgagtacaacaattctgtacagtataattggcattataattgtagcattgaatttaaagtttgcacagtcgctgattggaaaatttacaaagtggatgtcaaacatataaattttagtttattggacagttcaaggaatcagaaattggaattttatagtattaatattttatagtattaatataatgtataaaattttatagcaatgtatttcataagtataaagtgactagaattttaagaaatatacaaattctataaaaactaaataatttcaagtatattttaaaaatcttatttttcacaagtttaaaattgtaaacgatttcatcaagtctatgaatatacttttaacatgttatagtaaatctcaatataaatttacatttggttctttgtgtgttattttaataataaattaagtgaaaatgttattttacattaatatataatatctttgcataagagtgaataatataaaagagaaagaattgataataaaaacttaacaaaaaaattaatacataaaaaaaaataaatataatgtgttgacatttaattgaaatattcatacaataaaattgaaaataaatatttccaaatgagattagcgagagagtcctttatacgaaaaggcgccgaagaagaaatttaagaaatgccaatttttagagaagctttcaggcaaaaatatcgctaattgatgggactctggagagacttaagttaagatactataagtcaccgaagaagcaaaataatattaaattattaaatctttcaggtatacaaacagggatatataggctaggattattttccatgctgatatatcttttttttatgaaaaagtacaggaaataatatcaaagttacttaaatacagtaggtctaattttctagggagggttatatatgaatgaattgaaaagagtatctttgtacaatatacacaaagagcttggagcaaaacttgttgaatttgctggctgggaaatgcctttagaatatgagggtataaataaagagcatgagaaggttagaaaaagtgcaggtatatttgatgtatctcatatgggagaggtacagataaagggagcagagtcagaaaaatttatacaaaacctagttacaaatgatataagcacattaaagataaatgacattatatatacacctatgtgttatgaaaatggtggagtagttgatgatttattaatatataaatttggtgaagaagattatttattagtaataaatgcaggtaatatagataaagatgtagcatggataataaaacaaagtgaaggatacaatgtagatataaaaaatatatctagtgaagtgagtcaattagcaattcaaggacctaaagcagaagaaattcttcaaaaaatcacagatatagacttaaactcaataaaattttataagtcaattccatcaacaaaagtatgtggttgtccttgtttagtttcaagaacaggatatactggggaagatgggtttgagatatactgtaaaaataaatatgtagaaataatttggaatgaagttctaaaggttggaggagaagatatatgtccagctggtctaggttgtagggatactttgagatttgaagcagctctacctctatatggtcatgaaataaatgaacacatatctccaattgaaggtggtttatctatatttgtgaaaacaaataaagaatcatttattggtaaatcaattttatcaaaagaaaaagaaagtggagctaaaagaaagttagtaggatttgaaatgcaaggtaaaggaatgcctagaaatggatatgatataaggattggtgataaaacagttggatttgtaacaacaggatgtgcatctccaacgacaggaaaaattttaggtatgggaattatagattctgaatatgcaaaagtaggaaatgaaataggtatagcaatcagaaaaaaagttgttcctgctgtgatagttaagaaacctttttataaaaaacaatataaaaaagataatattatattaaacaaagaaaataaattttcatatatacctgctacaagtgaagataaatcaaaaatgttaaaagtagttggattaaattcggttgatgaattattttcagatataccagaagaagtaaaattaaaaagagatttaaatttggaaattggaaaatctgaattagaggtaagcaaaatagtaaaaagattgtcagaagaaaacttaagtttagaagacttgacttgttttcttggtgctggtgcatatgaccattatataccatcaattataaaacatataacttcaagatctgaattttatacagcatacactccatatcaagctgaaataagtcagggaactttacaagtagtttttgaatttcaatctatgattgcagaaattacaggtatggaaattgcaaatgcatcaatgtatgatggagcaactgctgcaatagaagcatgtataatggcaatgaatcagactagaaaaagtaaaatagtagtgtcaaaaactattcatcatgaaactttgtcagtattaagaacttacttacaatataaagattgtgagatagtagaaattgacttttgtaatgaatatgggactacagatatagaaaaattaaaagcttctgtagacaaggatacagcatgtgttcttatacaaactcctaatttctttggaattattgaagaaatggaagaaatagaaaagataactcatgaaaataaggctatgttaattatgagtgtagacccaatatcattaggagttttaaaaacaccaggtgagataggtgcagatattgttgttggagaagctcaatcacttggaaaccctcttaattttggaggtccttatgtaggatttttagctagcaaatctaaatatactagaaaaatgccaggaagaatagttgggcaaagtttagatgtagaaggtaaaattgcatatgtattaactttacaaactagagaacagcatgtaagaagagaaaaagcaacttctaatatatgttcaaatcaagctttaaatgctcttgtagcttcaatatatatggctactatgggtaaagaaggatttaaagaggttggtatgcagtctatgaaaaaagcacattatacttacaataagcttgtacaaactggaaaatataagccaatatttaaaggtaagtttttcaaagaatttgctgtacaaggaaatcttaatatagaaactataaatgataagctcttagaagaaaatatattaggtggttataatttagaatacaattatccagaattaaaaaattcaactttgctttgtgtgactgagaaaagaagcaaagaggaaatagataagttagttggaataatggagggattataatgaaagaatacaatagtttgttgatagatatatctaaaaaaggtaggaaagcatactcacttccaaagttagatatagatgatataaaaatagaagatatgattgaccaagatatggcaagacaaagtgagttgaatttgccagaagttggtgaattagaattagttagacattatacattattatcaaataaaaactttggagttgatacaggtttttatcctttgggttcttgtactatgaaatataatcctaaaataaatgaagatatggcagcacttccaaactttactggaatgcatccataccaatcttcggatacagctcaaggttctctttctttgatgtatgatttatcaagaagacttgcagaaattacaggtatggatgaagttacactacagccttcagcaggttctcatggtgagtttacagggcttatgattataaaagcatatcatgaaaatagaggtgaccataagagaactaaagtgataattccagattctgcacatggaacaaatccagcaagtgcagctatggcaaactttgatgtgattcaaatagcatctgataaaaatggagctgtagacataaatgcattaaaagaggttttgaatgatgaagtagcagctcttatgcttactaatccaagtactcttggtttatttgaaaaaaatataaaagaaatagctactcttgtacatgaagcaggaggacttttgtactatgatggtgcaaacatgaatgctattatggggataacaagacctggagatatggggtttgatgtggttcatcttaatcttcataagactttttcaactcctcatggaggtggaggtccaggagctggtcctgttggagttaaaaaagaattagtaccttttttaccaataccattaattgaaagaaaagaagataagtatgtactaaattatgatagagaaaaatctattgggaaaattaaaaatttctatggtaattttggagttcttgtaagagcttacacatatatactaactatgggaagggatggacttaaagaggctagtgaaatggcagttttaaatgctaattatataaaggaaagtataaaagatgattatattttgccaatagataccttgtgtaagcatgagtttgtattaggtggattgccaagaggagaggccaatataaaaactatcgatattgcaaaaagactactagattatggataccatcctccaacaatgtactttcctcttattataaatgaggcacttatgatagaacctacagaaagtgagagtatagagacattagatagttttatagaagctatgaaaagtgttgctaaagaggcaaaggaagaaccagaactattgaaaactgctccacataatactttggtcaaaagagtagatgatgcaagggcagtaaagaaacctatactaacatggtcacaaagataaataattaaaaagtagagatttaaagtataaagagaattaaatttgtaagaaaaagctatctaacttaatccagtttagatagcttttttgtatattagtatgtatggtattttctatataaagttttaaattatattagtgcttatatagaatattgatatgatgattatgtatagatattaataagaattgttgaatttatcttgccttaactttatttactcttttatcttaagaaaaacttaactaaaatatagcgaaattcataaaaatttaggaaatcttaagaattataatatttaaatctttagatttatattttattatataaactatagaataataaaatataaaaattgagaattttataatatatttgtagatttgagtataaaaaagtgctaagttgaaaggagtaaaatatggataaggttaatttagaaaggtatagttgtgatataaatgttggtttaaataaaaatcaacttcaaagtagaatagatgataatttaattaatgcatttgataatggaaaaaccaaaacatataaacaaatttttaaagacaatatatttacactttttaatctcataaatattgttttagtctgtttattagtttcagttggttcttttaaaaataccttatttatatttattgctgtaattaatactattataggagtaatacaagagataagagctaaaagattattggacaatctatctgttatagtttcaaataaggtatctgtcataagagaaaaagagaaaaaagagattgatgtacaagaattagtattagatgatattatgattttaaaaacaggtaatcaaatttgtgcagattcaaaagttttaaatggaaaattagaggtaaatgagtctttggttacaggtgaatctgatattattataaaaaataaagacgattttttatattctggaagttttgtagtttctggagaagcttttgtaagagttgaaaatataggaaaagataactatgcaaataagatagttaatgatgcaaagatttctaaaaaacataattctcaacttagaaattcattaaattcaatattaaaaattgtaggtataataataattcctttaggaattatattgtttgcaaaacagcattttggaaatggagattctatagctacatctgtagtaggtacagtggcagctgtaaatggtatgataccagagggattaacattacttacgagcattgctctagctgtaggaactataaaacttgctagtcataaaactttagtgcaagaactgtactgtgtagagactcttgctagagttgatacactatgtcttgataagacaggtacaattacagaaggtaaaatgcaagttgatgatatagtaatgttggaagaagtggatattaatgaaataatggggaatatatgtaattctctcaaagatgataatgcaacactaaatgcaataagagataagtataatgttttagatacgtataaagctaagaatttaataccattttcttcagaaagaaaatacagtggggttacctttgaaaataaaggtacatatttattaggtgcatttgagtttatatttaaggaaaaaaataaaaaaattagaatagaagttgaaaaatattctaaaaaaggaaacagagtaatagttttagctcatagtgattcttatatggaagataataatattcctgaagatataaagccactagcttttatattgatattagataaaattagagatgaagctaaggaaactttagaatttttttacaatgaaggtgtagatataaaaattatatctggtgacaatcctataacagtaagtgaggtagctagaaaagcaggtcttaaaacggctagtaattttattgatgcaacaacacttaaaaatgataacgatatatacgaagcagttgataaatacagtgtttttggaagggtaagcccacaacagaaaaaacaaatgattttagcattaaaaaaacaaaatcatacagtagctatgactggagatggtgtaaatgatgtgctagcgcttaaagaagcagattgcagcattgccatggcatctggaagtgatgttactaagaatgtttctaatttagtcttattagattcaaactttgcatcaatgccaaaggttgttatggaaggacgaaaggtaattaataacattcaaagagcatcttctttgtttttagtaaagacaattttttcattcttcttgtcactattaacattattcttcttcagtagacagtatccatttgttcctatacaattatcactaattggagctgtaacagtgggtataccatcattcttcttagctcttgaagcaaacaaaagtagaatttcaggaaactttttactcaatatattaaaaaatgctttaccaggagcactatgtgtgacagtaaatgtaattattgtttacaatatagttgaatatttaggctatagttcaagtgtattttctacaatgtgtgctatattaactggtgtatgtggtcttttaatattaagacaacaatgtttgccatttaataaagaaagattatttttaattgtaagtatgactattgcatttgttattgggattctatttttaggtggattattctcatttgtagcattgagtagagaattaattctcataactatggcattagcaatattaatgccaattatgataaaagttatgttatttgtcttggatgagatattagagacaattgttccagatttaaattaattttaaaatgatataaataagagcagttttagttgaactgctctttttagatgtgtttaattttatataagaatatgtatttttattaatcagctatatatgagcaacagtagtcaacaacttcattaacctttaaatcaaaacttgaatcactaggaacattaaatttttgcccttctttataagttacaaactcattgcttccaggcagttttacatccatacttccagcaagcatctccattatttcttcttctctagtagaaaaagtatattctcctggcaacattaatcctaaagtttttctttctccattaggcagtattattactctgctacttaccttaccatcaaaataaacgtttgccttctttactgcagtaacattcttaaattcactcattagataaaacctccaaaattatttgtacatatatattatataaaaataatgtaaaaaatgctatatatttgcaaaaaaaaatttagtatttattaaaaaaattaataagaataaaaaagagatgaaattgcttaaattgataaaaaatataaaataaattgcaaagtaagcaagaaaagaataagttgaagagttatatattataaatattaaaaattttagtattaataaaaaagatattacattaatatgaaaatataggagattagaagtgtttgataattacagtttatatattataataaaataaattgttaattttaaaagaggtgaattttatggcacatatatgctttgaggatatttgttatttgttattaaaagaagcaatgaagttaaagttaataccacataataaaattgtattatttgaagatgatttatcaataggtaatatttttgatgtaaataactacgaattaagagaaaatatttttaagattagaaatgtttttgaaaataatccgaaactattattcaagccagatttgttagaagataggaaattatcaaaatgtagaaatataataatatggtgtgcaaataacccaaaagatttgtgtggagtatattatgtagtgagtaagtttcaagataaaaatataaagattgcattagtagatgaaaaaaagacagaagatgctctaattagatattcatttaccagtgaaatgtctccagaagattttccattctttttagataagacactagaaattggctttaatgaaaaactagaatttaaaaataaatgggatgtgttagttaaagaaaattctatttttagagcattagtaggtaacgaaattaaaagtgttgaagaaacttattttgataaatatatattaagaaatatcagtgacaaatggcaacctttaattgaagtggttgcaaactgtatgtttgaagatgaaatgcgtgtaaaagattggtttatactttggagattagagaagatggcaagtttaaaaatagtaaaaataaaaggaagtaaaggggatttttattctgataaggagataagaaaagtttaaaaattgaatttataataaattgtattaaataatgggtataactatgaagaaaaatatcttaacagtattaatattataattagcaataagtataatatttattctataatttgaaaatataataactaataccttacgaataagtgtgctaaataaaaaagaaatacttatttcagggatattagtatatattttaactacatttttacttaatagtattaaaatatggtgctatagagtaaataaactagaaaatttcaactttaatattacaatagtttattctaaatgccacttctttagatataggagatgaaaagcaagttttaattttttttaatcaatacatgttagatatatcattgtaaattaacataactttgaatataataatgttcagaaggcaatatttttgaggtatgaatccaataatatagtcttatgattgtagatatcaaaaaatataagttactaggaatacgttttgtagatttatatatgattaataactaaagctataaataaacaaaataaaaagagtatgtttcaacctatagcttttagatttaaaatatactcttttattaattatagttgcataaattaaccataatatataattaaaatttttattataattatatattaggttcttcaattagttttccacatacatatctatgaatgatatttctatcatcaccaacatagataaatctttcaagtctttcaagtatagaataattgtcatgatttaaatttgaatcatcaataatcaatgcatcaaaatcataaccttcttcaaagctaccaacttttccaaagaaacttccaccacttttggttgcaatataaaaagcctcagataaagataagaaattatacttcttaccagaattaacccaatataatttagataattgtattgcagataccattgctttaaatattgacaatgtatgtccaccgcttatatctgatccaagtgctaatctaatattattatcgattaattttctgataggcatagcaccactaccaacattaaagttagaagctggacagtgaactgccataacattgttttctctcattaaatctatttcatcctgagaacaatgaacacaatgagccattaaagtaggagtttgaccaaataaattatatctattatatgcatctccatagaatttagattcaggttctagacttctaacccattcaatctcatcataattttcagataagtgtgattgcataggaatattatattttaaacataaatctcctaaaccttttaaaagttcacttgtacagcttggtataaatctaggtgttattattggttttacaatagaatctgtatcactatacttatttataatttcttctgtatcagcaatagaatcctgagtgttttctaataaagtatcagggcaattcatattcatatttactttaccaacgtatgctccaagaccaacttctttgaatatatccataagtttcatagaggcttctttatgtactgttgcaaacactgctattcttgtagttccagatttccaaagttcttttacaaattttttatacatttttgttgcatattctatatctttataatttgactcttctggaaatgtataagtttcaagccatggcaaaagctctttatccatagccattccaagatttttaaattgagaggcatgggcatggaggtcattcataccaggtattataagcttatcagtgtaatctactacttttaggtttttgtattccttaggtatctctttaaatattccctttactttacctttttccagtataatataactattttcaaatactgtgaaagtttctgaagtttttgtaaaaattatatttccttttaatacttttaacatataggtctccttagttttaaatttgttttaatatatgtaggtaaaattttgttttacaaatcaaaattttaccacatgtattatatcaaatctaaactataaatactattagataatagcaaatattagtgaaatacagttgtttactattattatatataactgacacttaagtgacatttaagaaaaatataatgcttacttacataaaatggaatgttatttaaagagaactttgattatattttcaaaagcttttttatccatatcgtttaaaacaagaaaatatctattcatagttatttttatattagtatgtcctaatctttcagagatgatttttatattagttccagctagaagaagaattattagaatagataatatagtaagtatttacaaatatgtaggtgttcttaaattgataaattattccattttaattttatagtttgaattttatgatataataaaaatatataaattttgcagtgagcgatatttttgataaagtagggtttaacagttgcaatgtaagggattgagggtgtatgataaatgttatcaattgcactactcatggttcactgcaaatttgagagagttgtatgtgtgtaagtactgaaaatacttagtttattttggggttttatattaactatgtggtatgtaaatttaatttatctataatttaaaacggtgaattacatatgttttatattaactatgtggtatgtaaattaaagaggggtacttcgtacttttaccactcaaactagttttatattaactatgtggtatgtaaataggtcaagcatagattttgcaactggaagataagaagagttttatattaactatgtggtatgtaaatgttttagaacagaaaaaattgtataaattgtggaatggttttatattaactatgtggtatgtaaatttgtaaaatgtaaatagcatattaatttttctttcacgttttatattaactatgtggtatgtaaattggagcattatgtttttaggttacggagcaacatttagttttatattaactatgtggtatgtaaatggtgatagtggaagttttacttatacttggcgtgctggttttatattaactatgtggtatgtaaatttcagaatacttagctcctgcgcctatatcgtctgaatgttttatattaactatgtggtatgtaaataaagttttgcgcattgtatgtgtgcctagattatctgttttatattaactatgtggtatgtaaatatgtccccacatcaattttcctccgcatgaaaaaatcgttttatattaactatgtggtatgtaaattttagaaacaacagaataaacataatatataagcatagttttatattaactatgtggtatgtaaatttttacttttcctttctatgtgtccaattcggacacattgttttatattaactatgaggtatgtaaatcttatacttagttagaactatatatcgacacaaatatgctttatattaactacatgatatataaattgcaatttttattcgttgtccaatcgcttgaaatttgttttatattaactacgtggtatgtaaatttgcaacaagtataggtaaaataccccaataatttatacagcattttctactttaaaatataattattttttatcatttgtagtaaataattaccagataacattgactttagttttaatgattaaaatataaaagtagaataattataaaaagtattgaaaagtttataaatatatataataaaacttaatgacaagatattagatataaaaaataattatcttataaatagattgaaatttatgaatattcatactataatttaaatataaagagatgtcctttaaaaataaaaattaaaaaatatttaatgctactacaataggaactagaactgcacttaataaatatacagaaattagatttggctcaatataaaatacaaatatagaatttaggtgttttttatgaaaaaaattttatatgctttatatagtttcattgttattatagctaattttagattaaaagaaaaaaattataactttattttattagcaatcttttttatactgctgttaattcaaaatggagttttaaaaacaggttatcaaaatagagctacattttatcaagataattattttaatggagaggataaaaatgataagataaaatttataactataaagatttttatatttttgtcattaccattatgttttaatatactattcaattatttaacttcttaaattatatttagatataggagtgttatgataaaagtaagattatgtgttgtttatattaaatataaagtgcatatagtgataaaacaaaagtttcatataaatgaagaaaaaatataaaataatttatttaactacttaaaaataaactaaaagggataataaaatagcttttaggttatggtaataaaggtatttaaaaagagtgcataagcactccaattgtgagaaatacatacacaaatcattattacaacaatgaaaaatgtacatataagagacgttttgtatttgttttaagtgataatattttaatactaactaaataattatcacaataataaaaaagaaaaaggagtattttgtactccatttgtcaaaaatataaaacttttatataagcttattataacataattgataaaagtgtaaagctatataatgaatttataaagaaaaataaaataaaaaagataaatcctaatcaaaggatttatctttttgtatagaaaataattattctattattaaatggcatggctaaactggataataatttattattactgctttcaatgttttttctccttgattatggtatgtatgaattgattcagctgaaaaacaaatagagtcattttctctaagttgataaatagagtcatttacttctaattttaattgaccttctataatcataatatattcctgtgatttttcagaatgaccaacagatgtataactatgaccttcttctaattccatttgaaataattcgaagtttctagttggtgtattgggataataacaataaagacgataatctttattttctgaaacttgtacatctatatcagtttttgatacaataaaagtttcattttgaggttgttccagtattgcagtatatggaacatttagtccacttgcaattttccaaattgtgtttactgttgggtttgagtctcccttttcaatttgcgaaagcattactttacttacgccagataattcagcaagttgacctagacttaagttacgttcattacgtaatctatttaaatttttagcaataacagtattaatactcatagtaactccttaaaatgtaaattattgacaaatataatttacgaatgtataatttatttaacattatttataatttacaaatgtataatataatgaacgttaaatacactgtacatccgtaatataaattatactgcataaagagttgtttttcaacggatgatagttgagagattaagggggaattgtaatgcgtgtacttaataatgttacagaggctataggcaatactcatatgttacatttatccaaaatagcagatgaatttggagttcaaggtaatatttatgcaaagatggaatacttaaatccgggatttagtaaaaaggaccgtgtagcattacaaatgattaccgaagcagaaaatgcaggtttattagttccaggtcaagcagttgtggaattaacaagtggtaatactggaacaggactagcaatagcttgtgcatgtaaaggatataaatttatagcgtgtatgtcaaaaggaaattctatggaaagagcaagaatgatgaaagctttaggtgctgaagtagttcttgtagaccaaatgcctaattcagttcacggacaggtatctggtgaagatttggcacttgtagaaattgaggctcaaaaaatagcaaaagaaagaaatgcatttagagcagaccaatttaatttagaagcttgtaatcatgcacatgaaaagtatacagcagaagaaatgtgggaacaattggatggaaatattgatgtatttgtagattttcttggaagtggtagtacttttgcaggatgttcaaaaacacttaaaaaacataattcttctatcaaatgttatgttgttgaacctgaaacagcagcaatttattcaggtaaagaaataactgaccaagggcataaaatacaaggtggaggatattctatggatttgccattagtagacaagaaacttattgatggttatattcaagttacagacgaggaggcaactgatgtagcaagaaaattagctaaattagaaggtgtatttgcaggattttcttcaggggcaaatgtgtgtgcagcaattaagttgttaaagagcagtgaaaaaggaaaaaatatagttttaactcttaatgatagtggtttaaaatatttaagtactgatttatatgaagaattgtaataatagcacaatagttatgcaatgttttttaaattaagtatatagatttaaattataaaaagtatctcaatgtgatttttgaaagttataaaagagatacttttttattttgtaaatatggagtatcctacttataagtattaagctatatagatattgatgattagctatgcaataaaaaagagtatgtgtttttgcatttatacatcataacttggaataatacatattaatgttctaaatgtatttaaaacatatgataaaattagaacaaacagatacaaggagataaacatgcaaaagagaattttaagaaattttatatttacgggtaaaaatattttaagtaaacttgtttttataataaaatataattttagtacattaattttatttgaattatttcataaaggattagccttattttttatatggccatctattagatatatatttgatattttaataaaaagtttacatatagtctacctaaatatggataattttataaaagttttgaccaatcccatgtcaatagttctgataatactatcagttataatactagctttttatgcattttttgaatttacctctgtaattatttgttttaataaatcgataaaatatgaaaaaatagggttatttgaactctttaaaatatcatttaagaactctataaaattgttatatcctaaaaatatactattatttatatttgtgatattaataattccattagtaaatacagttttaatttcagggtttataggaaaaatacaaataccagagtacatattagattatataaagtctgatataattttaaatataatctatatgatttttcttttaataatctatatttcggttattagatggatttttagcattcatgagataactttaaatacagaaaattttaaaagagcaagaaaagaaagtgttaatcttataaagagaaagattataagaacaattatttattcattaatattatctttagtagtagctattattggatatgcgatttatcatagtggaattatatttataggcatatggactaaatattgtactgatatggaatttttgaagaatgtatttataaatagatgtattgcatttgaagaatattttagattgattttatcaatattcatttttatattggacattggatttatctcagcaacttattatcaatataaaggagtaaatatttctaaaaataatattaaaaaagagaaaaaatctatatcaaaaattgtttttaatttagtattaatattattgatttcttatatagagtcagttgcattttcttcacatataaatggcatgtttaatacgtcattttcattttatacaacagcaattgctcatagagcaggagctgaaatggctccagagaatactttggcagcaatagaagaagcttcaaatgctaaagctgattatgcagaaatagatgttcaagaaactaaagatggagaacttattgtacttcatgattcaaactttaagagaactacaggagtagataaaaatgtttgggatgtaaattataatgaagtaaagacatatgatgcgggaagcttttattattatggaaaaggttattatgatgaaaagtttgttggggaaaagataccaacactcaaagaaatgataaaatattctaaaggtaaggtgaaattattaatagaaataaaacttaatggacatgaaaagggagacatagtaaaaaaagttgttcagttaattaaagaaaataattttgaaaatcaatgtatagttgcatctatggataaaactatattacaaaaagtaaaaaaactggatgagaatttactgacatgctattttatggcaattgcatatggtgatttttcaaagttaaattatgttgatatatatggaattgaatcaacttttgttaataaaacagtagtagaaaagattcataaaatgaacaaaaaaatcttcgtttggactgttaatagtgacagtttaattgagaaaatgcttgacctaaatgtagatagtattattacagataatccataccttatagagagtgcaatttattggaagaaaaatggatttattagtcaagtgtcagattatttattttaaatattctataattgtattatccagtaaaagagatattattaaaatcaataatatctctttttaacataaataaggttgttaaattaaggttattcttataaaaattgtgcttatcagctataaacaaggaataaaagtgaaaaaattgctctgagattattacagttaaaagagttttaagatgacagagagatagattgtcaactgtatatttaataaatcttgttatttattaaattttatataagtaaaatatataaattaataaatcttatgctagaatatatatgaaaaacaatataaatttggaggattaaaaacatgacagagcgagaaaaaatgttggcaggagaactttacgattgtggtgatattgagttgttaactcaatggcataaagcaaaagacctagtaagagattataaccaaacagattcctcggatttggaaaaaaaagaaaaaatattaaatgaattacttggtggtaaggataaaaacttatggattactgcaccgtattatgtagattatggaaataatatttattttggaaataattgtgaagtcaatatgaattgtacgtttttagatgataataaaattatcattggggataatgcactaatcgcaccaaacgtacaaatatatactgcatttcatccaactaatgctggtgatagatttggtaatgtcaaagaagatggttcatttgaattttgtaaaactcaaacagctccagttactattggagataatgtttggattggcgggggtgctattatcatgccaggtgttactattggagataatgtagttataggtgcaggaagtattgttacaaaagatattccaagtaatatgattgcatacggaaatccatgccgtattattcgagaaaacaaataaagttaaattttcttgcaaaatctcaaaaaacacctttcttactttatacatagggtattttccaatactttcacatccatattcatttgttaaatttttgtggaatgtagtttttatcacttctatcttacatttccaccattttttataaaagtcattcctttatagatttatttataatagtatatattctatttgatgtttgaataagcacttatttttaagtaaaatactaacttttaggttagtattttgctatagtatgatgattaagtaagaataaaatactataatacataaagcttaataaatataatttttattttacttagatattttcttttgattagtaatcaaaagtggttataatttttttaattaataagagtaatatttattttatgaaagaggattatattaatatatatttaaataggaaaaattgtaaaaagcataaaaataatataattaattaatgagataaaagtggataaaaatattgggagtttaatttttgtgaaattaaaaatattaaagctaatctacaaatatagaatatattctaagacgaattttcataattactaaataaaataaattaatcaatatagttttttaatataaacaaaaaataaaaaatttatataaataaaatgcttgtttttcttgtattatttatataaatattgaaatttgtctagttatacgtttttattgaccagttatgcagttgatattgaatattctaaatattggtgttattttataggtggtttaaacatattagggggattttatatatgatttgtatgatttatagagaatgtataaaatagtaaaggtttagagcatgtttagtggattgcagaatatgcatatagaatgattcttgtaaattaagttagacataggaaatatataatttgtattggatgattgattttatggtgtatgcttttaacttctataatgggaaagtaaagatgtactcccaatacatctttactttagcagaagttatagttacttataaagtacaaaaaattatatatttattagagtagataaatctaaaaaggtttttctagaaaaatttaattttaattgtatctacttactaataataagacttgatgtaagcaggtttcaactaccgtttctccatattctgatataaaatcatctaactgtgtatctaaaaaattacaataatcatatgaactactgatgtaagcagttagtatatgtgtacatttgtctatttctccaataaacatattatccatccccctaaaaaatttagtaaaaataaaaagtcgcattctattagtcaattaacataatttataaaattttttagtactagtttctataacttaactccttaaggttaaatattcccagttttaccaatttagttttattctacaagtatataatactagaagatgcttcattattcaacatgcttgtttgagaatagaaaatattctaaaattataattgtttttaaaaataagattcaagataaataaagttatatgcaactatttaataatctttccataataaggacagtaggttctattcttaaaaaactccatctttaaatttaaagaataactacaatttgaacaacaataaaatttccaatcaataaaaatatcaaaaataataaaaataattgaaaatgtataatttcccagaaaaataataaatgtaactccaataataaacacacctataaattataaaataatttaagctttatttaaggttagtattatatttatataagatttaagttttaatatatatgtgtaattaaaatgatttaggaggagaaatatattggtaaattgggaaataaaaaaattggctaaatctaagagtatgtttatatctctagggatattagtgttaatactaatgattagtatctttattacgcctgttttagaaacagaacgttattatatagataaagaaaaaggatgtatagaagatacgagaagtggtatcgacataggtaatgagaaatttcaaaataagattaatgttttaaagcagttttcaaatcaaacagatacaggtgaattttctaaaaaaattgaattaatgtcaaagaaaaaacttgataatctaagtgtgaatgaatataaggatattagtttttggaaagtatttaactatagagttacaaattcacttataaatgtaggaatgttaatcattatatctataattatatccaatatttacgtagatgaagtcgttacttcggtaaaagatatcatactatcatcaaaagagaagaaaaaagcattaaagtctaaaatatttgttgctttattagttccattagtaatttattctgtttatttaatgggaatatttattataacttgtatgcaacaaggagtacctgttaatggagacttagaatcttttagaatagtagacaatgtagttgcattgaaaactaatttaagtataacaaagtatgtaatattaaatataggcatagagcttttgatgtttgaaggatgggccatgatagccatatttgggtcttttataagtaaatcttcaatatcttcaataagtttttttatatttattatatctataactaagataatgtcggtaatccatatattacctaaaaaattactttcagttgtatcaaatgtaaattattatgatttgatatttggttttaataaaataataggaaattatctaggtgatattatgatatttaaagtgaatatagacattgtcaatatagcaataggacttttgatggcaatattgataggtgctatgtcattatgttttttagtaataaaatcagattatataagtagataaaaggggagttaagatgaataaattagaaatagaaaatctttcaaagatatatggtaaaaaagtagcaaacgacaagattacagtaactctggaaaatggagtttatggtcttctaggaccaaatggagcaggaaaatctacattaatgaaacaaataacaacgttgataaaacctgatgaaggtcagatactttataatggtgaggatatatttaaaatggatgctaattatagaaatattttaggatatttgccacaagaatttggagtttataaaaattttacagcaaaagaatttttacagtatattggagctttaaaaggtttaaggggaaaatatttaaatagtaagataggagaattattagatttagtaggtctttacgatgtgagaaataagtctataggaaaattttcaggaggtatgaagaggagagttgggatagcacaagttttactaaacgaccctaagataatagtctttgatgaaccaacagcaggtattgacccacaagaaagagctagatttaggaatttaatagcaaaaatgtctagagataagataataatactttctactcatataatttccgatatagaatcagttgcaaaggaaacaataatgattaaagatggcaaacttctaatgaaaggaacacacaaagacatattaagtcacatggaaaataaagtatataatgttcaagttaaaaatgaatgtgaagttgatgatatacaatctaaatataaggttgtaagtattcaaagtgatattgattcagtagtacttagaattgtttcagaggatattccaagtggggataatatacaaccagttcaagcaaaattcgaagatgtatacatgttttattttgatttggaagatgcaagggaggtgtagtagaaatgatgtatttagttaaagctgaaatgataaaaatattaaaatcaaagagtgtttggataatttggctgtttttaatatttttgggatttcttctgattagaaagtttgatgttttagatacttatgcagatatattttacaagatagaaggctcaatacctctaataggtttgataatgtttataataacttctggaaattacattaaagaatatgattctaatatgacaggtttaataaatacaactaaaaagggaaaaaaatcagtagtattatcaaaactagtagctaatggattaattttatctattattaatatttcttttatattgttagtaggaattagaggttttagtttttttgattttaaaaatttaaatgaaccgattcataacttatggtactttggaaatagtaatttaaatcttacagtaatacaaatgtatataattgttatattgactactatttttgcttcttttatatttgcacaaataggcttaacactttcatctatatttaaatcggctgtaattccatttatactaggtggattgataatggcaattccatactttagtgtaggttttataccagataaagctataaaatttatgtcagtgactccaaattggattatgatgagccaacaaatggttaggtataatgtaccaagtattttgatagttttttctatagtaatctcaattatattaatgatagtgttaactaaaataacatatgaaaattttacatcaagcaaaaggttttaactaaaaataatagtaattttatttatattttagtttaattaaaaataagataaatgaattttagataaaatatatgctaatatatatgtaaattattacaggaggttgtttatggaaaatcgtgttttaataatagatgatgaagtagaaatattgaagcttttagaaactgtcctaaaaaaagagggccttaataatatatatactgcaaaaactaaaaaagaaggattagaattatttaaaagtattaatcctgatttgattgtattggatattatgttaccagatggcgaaggttatgatatttgtaaagaaataagaaaaacctccaattctccaataatatttttatcagctaaaaccgaagaattagataagttacttggactagcgattggaggagatgattatgttacaaaaccttttagccctaaggaagtggcttttagagttaaagcgcatttgagaagattaagttattttagtgatgttcaaaacgaaagtaaaaatctaaataagaatgaagaaaaaattatatcatttggcccatatatattaaatgaaagtagggcagaacttataaaagatggaaaatctataggactgtctgcaaaggaactaaaaatcctatctttatttgcacataatcaaaatcaaattataagtaaagaaaaactatgggataaagtgtggggagaagattatgttggatttgacaatactataatggttcatataagaaaaattagggaaaaattagaggataatccttcaaagcctgaatatattctgacaataaaaggtcttggatataaattagcagtaaaggaagattagaatatgaagtggaagattactagaaattttatatttacaattgtgtttgtagctatatcagtagtaattataaatattatatctatattgtatgtgatttcaactaatagcttttttaaagttgtagattctggaaataatcctgaagaatttgcacgttcttttgaaaaagatttatatgaaaaagatggagaatttaaactatctaagattggagctgaaaaattagaaaaatcaaattcctggatacaggttttaaatgatttaggagaggaagtttatggagtaaatgtgccaaaggatactccaaaaaaatatacaccctttcaaatggtgaataattacaagtatatagaaacaaagtatgttaattttgtactagaaaaatatttaaacaaaaaacatctaaacataatagtaggtatacctagtagagatatatcaagaataattttaacctattctcaaaataacattaaaaaaactttaaataaagttatcattataacactagtaattgatagcgtggtagctttaggtgtaggatatttatttagtagaaaacttacaaaaccaatttcaagcgtactatggagtattgagactatggctaatggaaattatagtttatatcttaaggacagaggtatatatgaagaagtttttaaaaatataaatatgttagctgatactttaagagtaaatgaagttgagagaaaagaaaatgaagagttgagagaggaatggctggcaaatataacacatgatataaagacacctctagcatctatacaagggtatgcagagataattaatgacaaagattatgagtttgaagaagatgaaatacgagagtatacagaaattatatataataagtctaagtatataaaagatttagttgatgatttaaatttatctactcgattaaaaaataatactatagttctggacaagaaaaaaataaatttagtcagtttagtcagagatataataattgatattttaaatgataatagatataaaaataggaatattgaatttgaaagtaatgaagatttaattgaagtatatgtagattcaatcttattcagaagggctataaccaatcttatatttaattcaatagttcataatagcgaaggaactttgataagtgtagaaattgtaaaaaaagataatatagaaattataataaaagataatggaattggaataagcaaaagtgatttgaaacatatttttaaaaaatattatagaggtactaatacaggtgagatgcataaaggttcaggtcttggtatggctatttctaaagaaataatagagattcataaaggtaaaatttatgtaagtagtgaaattggaataggaacaaaaattattatagagataaaacaaaattaggagatatgatatggatttttttaaaaaaggtataagtgggtttactattaagattttagcattaatatttatgacatttgaccatatagcagcatttatgccacaaacaatgcaaataccaatttggtttcattgggtaggcagaatatcagcaccactgtttatattcatggctgttgaaggattttatcacactagtaacagaaaaaaatatataagtagattgtatatttggtctgttattatggctataggaaatcaaataattaataatgtattttcacatccagaaggagctataattataaataacattttttcaacattatttttaatagcgatttatttacaagcaatagagttcataaagaaatttagaaaagagaaagaaattaaatattttattataggattattgatgataatcattcctataattttaggaatatttacagtagctttactttttaaagtcactaacagagttattactttatttatgattttggtaccagtaccatttttagtagaaggtggaccaatttggattatacttgggattattttttatttgtgtagaggtaaaaagttcagtttgagtatttgttatgttttgatgtgtatatttatatttacaacaatgtcaaatggagattatagtttaaaaaattctattttacaaaattaccaatggatgatgattgcttctctacctttaatgttactttacaatggagaaaaagggaagagtatgaagtatttattttatttatactatccaatccatgtatatatattgtatatcttaggaatatacttaataaatggtttttgattgtaagtgatatttttaatacaaaatgaacaatatgaggattgttttaggtctattaaaattgttatttagatgagatttgtagaatatttaaatttatgagcagaaattcagttattgtaatttcaataacattagaatataatattataatttatttagaaatatatgatgttatatatggtttggttattaatgtaataataaaatagaggtttgatataaaattcaatacctctgttttagtgttttttatcctatatttatacttattttatttataaattagtgttttgttttaattaatattagtgcattttttatttattttataaaattagtcataattgtttcttcatattgtggttctttaattccagcttttttacctgctgatatacacttaagaagccatgccatgttttctcctagagttcgcatagtctgtaatccttcttcatctttcataacatcctctggagtaaagccatgtacctgattccaatactgtgatgatacaataggcatattgctgattgaaaaatatttatttagttggtcaaatgttgcacttgcaccaccacgtctacatgacacaactgaagcacctaattttgtagccatgcgacttccagctatgaaaaatagacggtcaagaaaagaagttaattgaccagttgcactagaaaagtaaacaggagaaccaataataataccatcaatattatcgagatcttcaatcaattcattaactttatcatttcgaatacattttccagtttcaaaacaggatgcgcaactaatacatcctgggattgcttctttacctaaatacagtatttctgttttaatatcgtgtttactcaatactttagtaatctcatttagtgctgtataagtacatccatattggtttgggctaccgtttatcaataaaactttcattataaatttcctccaatgaattttatttaatagattttctaagagatattattttttataaaataggattttcatgaatattatcaatttatatagaaatgtctaatcttagaatcctatttaaaataactctttttttagtaaatacacctcctattataaaattgactttcaattattcttacactataattttattataaattattctaaaaacaagtacgcacatttttgttcaatactaaccaaaaggagagtgtaatatatgagtatagactgtatatcaaatacagatttaagtgaaacaggatttagttatacactttcactgattagtggtaaatataaaatgataattctttactgtcttgtagaatttgaagttgtcagatataatgcattaaaacgttatataaatactatttcctataaaactttgagtttatcattaaaagaattagaagcagataacttgattattcgtactgaatatcctcaaatacctcctaaggtagaatatagtttatcagaaaggggaaaatctctgattccaattttagatgcaatgtgtgagtggggagagaggaatagaccttaattttgtatctgtagatgccataaaaagactgtgagtaaaattgtttgaataatctactcacagtctatatttaaattaatagttagtatttttaatttataaaatactaaaaaatttattatgaaatttcaccaccaatttcttttacatcttctttgtatataatacaagcttctatagctaattctaaaccttttactatttcttctaaagacatgaatggtgtattttttttatttattacctgtgaagttgtatatgggatgtgtataaatccaccctttatattaggatatttcttgtctatcatataaaggattccatacatcacatgattacaaacgaatgttcctgcagtgtttgaaacactagctggaattttattttcattcatatgttttaccatggcttttacaggtaattttgaaaaatatgcaggttcaccatcttcttttataatagtatctataacctggttaccttcattatcttttattctaaaatcatctatatttatagcaactctctcaggtgtaatgtcaaatctacctccagcttgtccaactgatattactatatctggattgtgctcttgaatagctttatctatagcttcaacagattttgtcataactgttggtatagttatctttatgatttctgcaccgtttatattattattgaccctttcaactgcttcttgagctgggtttattagttctcccccaaatgggtcaaatcctgttaacaaaattttcattattttacctcctaattatattaaaatcctaaaaagtacattactaatatgtgggctataattaataccaaagcaactggagcttgatattttataacaatataatcatttttacattctagcaaggctgctggaactatattaaaattagcagccattggagtaagtagagttccacaatatcctgctgttaatgctaatgctccaattatagcaggatttccaccttgagacaatacaaaaggaataccaattcctgccgttatgactgaaaatgcggcaaatgcatttcccattatcatggtaaatataaccatacctaatacataagctataacaccaaataatctgctatcagcagggactacaccagatatcatggttgaaataacttcgccgactccagcctgagtaaataaagctcctaatgcaactaaaagttgtggtaacatactagcaggtcccatttgttgaagtaatcttgagccatcttgaactgatgtagcaggttttgctttagttattataagggctgatattaatgcaattattgaacccacacctattgcaaattgagaagaattatcaaaattagaaaggctcatagctactactactgcagcaaatgctaatattaatgatggtataaatattttatttttaagtttgtctgcttgttcttttccaaaattttcatctggttcttcatactttgcaaatacaacttgtttagaaagtgttaataaactagataatattaatattattcctattatattggctggaatcaatctaccaaatatgaatggcagtgatataagtatccaaaataatgatgtaccatatttcttattgttatttatggtagtaaaagacttatatgctataacaatcattaaaaatcccattagtgcgtaaaagatttccaatgatatgtttataaaattttgcatttttattcctcctaaataaaactattttttatgacttttgtttaattttttatcatataaggtaaactggattgtagccactacaagtgctattactgccataatagtactagcctttacaatattaagtccagttacattgtatccaaattgagttagagtagatgctataagtaatactccactactacctgcaaataagttttgaccataaaaatttccatagttttctgatgcagcagataatgcctttatggcttcttcatccgattcttttagttcatcactattacttaaaccagcagcttgtgccataggattaacaagtggtcttacaaattgaggatgtccactcattcttattgatagagcaccagctatttgtctagctatcatgtatatagtaagtacttttcctgttgtaagtctttttaatttttctattaaagaaacagctctttgttttaaaccatatctttctaatacaccgattactggcagtgttaatatgaataatgatacacctctgtttgagacaaaagaatctcctaaaattgtaaaaatttgattaaaatctaatcctgcaacaattcctgttgccactcctgctaataatacagtaaataatgtgtcaattttaagtataaatccaattacaactatcaatataccgattagttttatcataaattgttctccttccatttctatatgttttaatttaaatttatttaatggataaagttaaactctttttatagtatttgcgttaataggactattattataaaatttaataaaaaatagggaagatgttttaaagtatcaaagtaaataatggttgtgtataggaatttgagtaacaaagattatattttaagctaatatgaattgattttgtaagtctatggtttaagtatatgtcaatatttgaaataggttttaaattagatattatattataaaaagagaatgtgtcaaacatagagacaagtgtatttttctcttttgaaatgataaaaatatatttgatttcatacaaaaagagagtgtctaatgaactttttagttcattagacactctctttttgttatgattaataaagcatatattaagagctagtttcattagatttcactaagaaaaataaaattttgataaagtttaaagactattttgagcaatattacttataaataaaagaatttatcatagaaataattagttttattttagctattaagatttattaaaaaattatctatattatcctgtgatattctaaaactgtcataattaccttttgaaacagccttcataataagtttatctaaaaatttcattttttctaatcgagcttcactaccaaaaattccaatagcatttgcactttctaataaggatgatggaaaatttgattttaaatatttatctgcttgttcagaaaagccacagcaaaggaaaatgccaacttgttttttgtttaataactctacattatcattacatagcacttgtattttttttgaaactgaaccaacatatatagaacttccaataataattttatcaaattttgataactcaattttattattattattaatatcaacaatagtgacattatctgatagtttattttttagtatatttgcacagtcttttgtacaaccatatttacttgaatatataataatagtattcataattattctccctttcttaaagcattttctacagcttttcgtatagtattactgctataagttgcagaagttatagcatccacatctaaagactgttgtttaataatacttgttgtaattttttcagcaggtttacctaaaagatggtcgtgttttaagatattaatattttggattttaccattattaacttcaacagacacagtagcttttaccaagttattatcagcacttccagtataaatgccatttttaacattattaatatctatatcttttactaccaagttttctggctttaagttgcttacaattacaataataatgcatataaatacaaagaatagagcaatagatatttttacatattttttctttttattagtagctttgttgcgaattttcattgtaaagtcctcccactaaaatatctaagaaattttctataagttgagaaaaattatgtaaagaatatagtttattttcaacaacacataaaacgaatcctaacaatgcacttataagcatccatgagcttttatctatattttttttgaatattccttgttcaattccaatggaaaggaatttatcaagcatttttataccattattgctaggagtattgtttgtattttcagatgcaaatataatattcattctactatgcatgatagcttttgccatctctggttcactagaaagagtttttataaagctagtcataatttctatgatttgtttatctattggtagtgatgagcaattattcataatgtcaatagcattactttctactgtgttataaagtttattggtcatatcgctgataatctctgctttgtccttgtagtaaagataaattgtagttggagaatattctatttttgtagcaatttttcttattgataaattttcatatccatgttggtttataatttcgatgctagcatccataatctttttcttcatttcttctttttcatttttacgtctttctttgatactcatataatcacctctttgcttaacggtgttaagttaatttacactgttattgtataatttaattttaatactgtcaataaattattaaataatataagttaatatatttttatggataataaattaatgttattaattgtaatatttaagatattattgtataataataatcggtttaaatgcgccacatcttattaaagttggttcataattctaaataaactttaataagatacattaaaatataataaattcttttatgctataaaatttattttatagctattaaatcagatgtttaaaaattttttaacagtctatagtttttaagagtctatagtaagtagcctaaaaatatgattttacatctgtacttgttcgagaactccaagtataaaaaactaaggaattatatagtggcagtatataattaatacccttagacacacctttttgaaagtggaaaaaagatgtgtagttctcctcgaccacaaatcaaggaggataaaaaatggaaaagagaaaagtaataattgattgtgacccaggaattgatgattctttggcaattcttctggctttaaactcaccagagctagaagtaattggaattaccacatgttgtggaaatgttccagcaaatataggtgcagaaaatgcactaaaaacacttcaaatgtgttcttcactaaatattccagtatatataggagaagaagcaccactaaaaagaaaacttgtaacagctcaagatacacatggagaagatggtattggagaaaacttttatcaaaaggttgtaggagctaaagcaaaaaatggagcagtggattttataataaatactttacataatcatgaaaaagtatcaataatagcacttgcaccacttacaaatatagctaaagcacttattaaagataagaaagcatttgaaaatctcgatgagtttgtatctatgggaggagcatttaggattcatggaaattgctctccagtagcagagtttaattattgggtagacccacatggagcagattatgtttacaagaatttatctaaaaaaatccacatggtaggtttagatgtaactagaaaaattgtacttactcctaatattattgagtttataaatagacttgataagaagatggcaaagtatataactgaaataactagattttatattgatttccattgggaacaggaaggaataattggctgtgtgataaatgaccctctagcagtagcgtactttatagacagaagtatatgtaaaggatttgaatcatatgtagaagttgtagaagatggaatagctatgggtcagtctatagtggattctttcaatttctataaaaaaaatcctaatgcaattgttctaaatgaagttgatgagaagaaatttatgtacatgtttttaaagaggctttttaaaggttatgaagacattatagactctgtggaaggagtgatatagtgtgaaaagaaaaatatgtgtaaaaactattacacttatagcttttggtatttctataaatataataggcgcttttatagctatgggattaagattacctgtatacttagattcaataggaactataatgatagcttcacttttaggacctaaatacgctgttgttacaggtgtgtttggaagtttaataagtggaattacgtttgatgtgtattctctctattttgcaccagttcaaatatcaaccggattacttgctggaatagcatttaaaaagaattttttaaggggtttaaaaactccactaggagtacttttatttgctattccaacatctataataagttcaataatttcagcatttttatttggaggtatgacctcttcaggttcatcctatatagtgcaaatcttgaaagtgttaggactgggagatgtttttagtgtgtttgtaacccaagtatttactgattatggagataagctgttagcagttgttttagtgaatttaggattaaatgcagttccaaaaactttaaaggtatcattgactggaggaaaatagatagaaaatggatagatatagtgagataacaaataaaaatcaaagagaaattgttctgcttaaaggatttccttgtatatggggaaagtgttctttttgtgattatatagatgataattctaatttagaagaagagatgaataaattaaatctaagggttttaaaaaatgtaactgggaaatatggagttcttgaagtcataaattctggaagctgttttgaattacctaaggatactttagaaaaaataaagtgtattataaaagagaagaatataaaaaaattatttttagaaagtcattggtcttacaaaaataggcttaaggaaatgagagagtattttgaaattcctgtggtatttaaaattggagttgaaacctttgacaatgattttagaaataatattttaaataaaaatgcaaattttaagactccacaagatgtaaaagaatattttgattcaccttgtattatgattggaataaaaggacaaacaaaagagatgatagataaagatatagagattatcctaaatacttttgaaaaagcgacagtgaatgtttttataaataattcttctagtataaaaagagatgaagagttagtgaaatggtttgttagtaagtataaattcttggatgaaaatccaaatatagaagttttatacaataatacagactttggtgtaggagattagcattaatttagtttaaatttaaaattgaaaagtttcttatgtttttgaaaaagcttctaatagttagaagctttttttgtagagttttatgttacaataagaaaaaaggaattaaggagcaattaaatgatgtttgataggggaaaatggaataaattggattataatgaacttttagaatatatgatgtctataaaagatataaaatatagagattttaataaaaagcttatacctggaacagaaaatataataggtattagagttcctaatttaagaaagttatcaaaagaaataagccaagggaattggaaggaatttttagaagtagcagaggatacatactatgaagaagttaggctacaaggtatggtaattggcaatataaatagtaattttgaagaaactttatactatgtaaaaagatttatacctaaaatcgataattggtcagtttgcgatgggttttgttctggtttaaagtctatgaaaaaatataaagaaaatatgtatgatatacttaaaaaatatgtttattcaaagaatccatgggaaattagatttgcattagttatgtttttaatatattatgttgatgataaacatattaaagaaatatttgaatactgtaataatatacaaagtgaagaatattatgttaaaatgggtatggcatggttgctatcaatttgttttattaaatgtgaagaggaaacttttctctatataaaaaataataatttagatgatttcacttataataaaatgctacaaaaaataattgaatcaaatagagtagatttagaaaagaagaatataataagaagtatgaaaagaaagacaagaagatgttgacggaggaatattaatgaataacaatgaagacagaattgacaaatttttagaacttcaaagcaaaggatttaaatttgcagagatagctcaaaatctaaagattagtcaaagtactttaagaacttttttaaataaaaaaggatataagtcagaaaaaggtaaatacatattaaaagacgaattaaattataataaaagtttggataatagaaacttggaagaagagaaagctaaggagtatgaaaaaagtaaaaagaatactataagtaatagaaaaaaagtaagcaccaaaaaaaagatttctaatgaaaaggctttaagtaaaagtgttgaacaaattgagtttaatgatacaggtttaaaaaatgcaaagcgaaaacaaaatgttaagcctaagaaagatagaaaaataaatataactcaagaagatttagataagctttgtgaagtatatgattggtatttagaagtaaaagattacaatataaagcctaaaaaagtatctaataaaaaagatgtacatatagatgatgaacacatagatgaattaaaaacaacaagaatacgtatagataaagaaatatggaatgattttgaaagattatgtagtaattcgaattttgaaaaacatcaaatacttacacaggcattgaaagaatttatgaaaaagtataaaaatctactataaaatactactatatgaggtgcttaatatgaataaaatagtaaaaaaatcaatttctctaatgattatattaacaatatttatttttatgttgacagcatgtgaaaaagatgaacagcctgattcagttgatattcaaacagaagataaaaatgagataaaaatagatgagggaaatgcaaaagtattgaatataggaaaatcagaaattataaatatagatgaaggtgataaagtagatacatcaacaaaggtagaaaataattcaacatttaatatatccaatgttgaattgatatataatgaatatgatgagaataaaaaaattatatcttcggatagtaaggctttgttggatatgactttaatgcctgggaaagttgcttacatagaatgtgggcataaaacttttgtaaagggtgtagaagtttatgcatatgaatatgaggcagagggtaagattgtgtatgttaatttaaaagaaaatactattaatataagaaataataatattaagctagaaaatagtagtcagtatgaggtgctatctacatcagaacttaaaaaagtaaatgaatcaaatgagggaattacgtatcaagtaaaagtaaaaaattcatcatcaaaagatttaggaaatattattcttaagacagcagaagttaatgaaaatggagaatatttaacagtaaatcgtgtaccatcatataagattttaaagccttcagaagagacagatatagatatattgtgttcaacaaaggcaaaaagtgttgaaatagtgggatatacgtatgatgatataaaagaaaaagccaatgtggatattgacttaaaatctcataaagttaagatagacaaataaaggtaggggatacttatgaaggttttaatagttgaagataataagatacttttagaaagtgtagtagaagaacttagcaagcattttgaaactgaaaagtgtgaagatggagaagaagctttatacttagtaaatcaaaatatatatgatttagttattttagacttaatgcttcctaatataaatggatttgatatcctaaagaaaatgagagttaataatatagatacacctgtacttatattgacagcaaaagaaacattagatgacaaagtagaagcatttactataggagctaatgattatttgacaaaacctttttatatggaagagttagtagctagggtatacgctatattaaggactaatggaaagataaaagaaagaaacggattagaatttaaatctttatatttagatacactagaaaaaagagtgtatattgaaaaagaagaaataaaacttcaaaacaaacagtttaacttgcttgagtattttgtattaaataaaggttcaattttattaaaagagcagatttatgatagaatatggggaattgattcagatgcaactattgaaatagtggaagtatatgtaagtaatctaagaaaaaagctaagtaaatatggatatgataaatatattaaaactaaacgtaaggtaggatatatattcgatgataaataagaatgtatttaccagtactaaaaatcatttaataaaaatgtatattattgtagtaggtagttttttaataatcttttctatatttatatactcatattttaggggacttacatatagtggaattgatagtgagataaatgatgaacttgaatatatagtctctcaatttaaaagaacttcatttttgaacccaataagactgaaagatcctaaagatatggtgtatgtatatgaagatggaaggataagttactatactcaaaatgaatattttgatgagttacttccagatagaagactagataaaaaaaattcgttttttaaatacacagaaaatggatatacttttagagaattaaatgtagatgtaggtagataccaaatacagataattagaaatatagattctgagatgaattctttaagacagcttacatctgttcttataattggaatattaatttctgtaataattacttactttgtggctgtatatctcactagaaaagctttaattccaatagaaacagcatggaaaaatcaagctaagtttatacaagatgcttctcatgaattaagaacaccaataacaatagtttcatcaaaattagaaagtatgttaaaatccccagaaagtacagtaaatgatgaagttgaaacaatagctactgcaatgaaggaaactagaagacttaaaaaaatgataactgatttattgtctcttactaaagaggactctattgttaaagttaatttagaagaaatagacttagaaaaattattggaagaaatatcagaagactatattgacattgctgagtttcaggaaaaaagattcgtgtttaattctaaactgaagaataaagttataataacagataaaaataaattaagacagcttatattaattttcattgataatgcctttaaatatacaaaattgggtgatgagatagcattagaattaaaagaagatatagaggatgaggtaactttacttataagtgacactggtataggcataaaaaaagaagagatacctcttatatttgatagattttttagaagtgaaaatgtaagaaataaagatttagaaggttctggaataggactttcaatagctcgcatgattagtttaaacttatctattgatataaatgtaacttctgatgtagatattggaactacatttgaattgtcaataccaaaaaagttaaaataataaaaatataaaaaattgtttttagaaatgaagaatgggtatactaattagtataaaatataaaaagaccttataaaagtaaatttatatttataaatttcatagtataattatatagggataataaagtttaataggaggatttaaaaatggcaaaagttataaatacatctgaatttagaagtagtgttgaaggtagtaagggagtagttgtagttgatttctttgcaacttggtgtggaccttgtaacatgttgggacctgtatttgcagaattaggtgaagagatgaaggataaagctagatttgtaaaagttgatatagatgagagcttagaaatagctcaacaattcaatgtatctacagtaccaactatgattatatttaaagatggaaaaccagtagaaactttaattggattcatgccaaagaacaaaattgaaatgcaagtaaaatcatatttataaaaaatgggtgagtattatgagatatgatatagctataatcggcagtggtccagctggattgtctgctgctataaatgcaaaaataagaaataaaacaattatcatgtttggtaatgataatttaagtaataagcttgttaaagctccttcaatagataattatttaggtttttatgatataagtggtgatgaattaaaagacaagtttaaatcacatatagatagtatggatatttcaattgaaaataaaagaataaataatatttatgctatgggagaatactttacaataatgtctggaaatgatatgtatgaagctactactgtaatccttgcaactggggtagagtatactagaccaatcaagggtgaagaagaatttctaggaagaggtgtaggctactgtgctacatgtgatgcaccactttatagaaataaaaaggtagcagttataggatataatgaagaatctaaagaagaagcaaattttttaagtgaactcacttcaaagacttattttatacctatgtacaaaaaagataatcttatgagaagttcagataacctagatgattctattgaagttatacatgacagaccagtacagatagatggagataaacttgtaaacaaagtatcttttaaagaaaaccacattgaagttgatggagtattcgttataaaagatagtacggctccaagtgcattggttcctggaatagagattgatggcattcatattaaagttgacaataatatgaagactagtatagatggatgctttgctgctggagattgtgttggaaaaccctattcttatataaaagcagctggtcaagggcaaatagcagctttaaatgctgtttactatttagataaattaaagagggcttaatatttatattgattaactttttaaagatatttataaaaaactgtcttgaaataattttattatttcaagacagttttttatttttaagttattaataaaagtattttaaaatctatatgtaattacttttattaataaaattcaaagttatattagtagaaattggaattatttataatatactccaaaatttaaaaataatggttgaaaaatctaattaagagtactataatttaattaagtaattacttaatcaaaacgaggtacttatggaaaacttggttaaaatatttaaagcattgagtgatgaaactagacttaacatacttatattagtatccaagagaaatatatgtcaaaaggggatttctaaatatctagggatttcagattctgctgtttcacaacatataaaaatattaaaagatgttgggataataacaggatataaagaaggatactatgttttatatcatattaataaagaatcatttaatatatgtgtagattttataaattctatgttaagtaattctagtgaaagctttatagatgtatttgatgtaaatacaatacatctaggatgcagtaaagaatgtaaatctataaaaaaatgttgtaagagaagggagaaataataatgaaagtatgtataccagtagaggagaataaaggattggatagtaaaccatatggacattttggttctgctccaatttttgttgtgtgtgatttagaaagtggagaagttaaatctttagataatggagatttagatcatgaacatggaaaatgtcaaccattaaaagcattgtcagggacagctgtagatgcagtagttgttggaggaataggacaaggagctataattaaattaaatggaatgggaataaaagtttacagagcagaaggtgatactataagtgctaatttagacttacttaaaaatggaaaattagtagagtttccatcagaccatacttgctcacatgacggatgtggacatcattaaaaaaaacagctgatgaaatatatacttcatcagctattttttcttttaataaatacgattttattcttttaaaaccaaaatttagatttttatgttttttgtagtatccttaataatatttcaagtttacaagtttactacttttagattttttttgtatgtttttctatatagtcaatatcatttaatatgtcattgagttctttattaagtgtttttaaatcatcaccatctacattgtagtttaaaaatagttcctctacattatcaatgatagaattgacttttctagtaacttcaacaaatgtcttaaagttactactatttttagcatttagaaatttttttaaatcctttgatataaatgatactatttcatattcatcattaaatagacctctaccaataggatatggttcaattctctgtaaaaaatattggtctttagcattaatattataagtataagatatttcccaaccgtctcctaaatcaaacttgataaaatataatgtactacttacttttgatattcttgtggcaccaagctgtcttaaaagaacttcaatcgaatcaccttgaacagtattaatattcatatatacacatcccctttagtattattatactatattttttaaaattttataattaaataaacagtagatataataatagatataatcataagtggaaaacctattttgaaatactccttaaaagagataggatgaacgtgtttattacctatacctgctagtacaacattagcagatgctcctattagtgttccatttcctccaagacaagctccaagagatgttgcccaccatagtggcattacatcaataccttcagcttgcatagtcaaaataagaggaattagtgttgcaacaaatggaatattatctaagaaagaagagactatagctgataaccataatatcaacaacattgtaaatacaagatgtccttctgtaagtccaatcaatgcttgagccaatttgtttattatcccaacttctactagtccaccaactactacaaataatcccataaagaataaaattgtggaccattcaatacctgccataatttcatctacatcttgttttcctattaaaagcattatagatgctcctgtcagtgctacaacagaagaatctatgtggattgtactgtgaaacataaaaccaaaaagtatgaatgctattaatataaggctttttataagtagaggtttatctttaacagattttttttcatctagttttaatattgcatttttagctctttcattcacaacaagttcttttccataaataaatctaaagcatattatagttatagcaagtattactataacagcaggacctaaatttattacaaaatccataaaactaagattggcagcactaccaatcataatatttggagggtctcctataagagtagctgttcctcctatatttgaagctaaaatctgtgttattaaaaatggaactggattaagtcctaatatttgtgtaataactatagtcattggtccaataagtaagacggttgtaacattatctaatacagctgataaaatagctgttataatagcaaaacaaatcattatcttccatgggtcacctttagctttctttgcagtccagatagctatatattcaaataaccctgagtttttgacaacagctacaaatagcatcataccaactaatacaccaatagtattgaaatctatatggcttaatccttcatcaagtgtaagtatattgaatattatcattaatagtgcaccaccaacagctgctacggatctgtttaccttttctgtaataatagctgccataactattaaaaatatacatatagctattatttgttgaaattccataatataagtacctccatttgtattattttgtgcctaatgctagtactatatatagtattacttttttattgttttttcaatggatgtatgaaagtatattatttaacaaagtttttgagaaattgacagaatttaaagaaaatttttgttatttaaataaattttaaaattattccattgataataatattaaacgacaaacgaaaaaatataccctttaaactagaatttattgtatccaataacaattataaaatattaaatatatctatattataaaaataataaaaaaaggtttgatttgaatataaaactgcaatatattaaaaaaattattcattttaaaccttgtaatttgattttataaatattataattaaattaatgaatttttaacaaggaattattcatttttttgattttaagatttattgagaaaacaaaactaaataggggggtaattaatataatgaattttttaaatggtattttaacgagtattaacaatgcagtagtatttgtaaacaattacttatggtcgtatatcttaattataatgttagttgtaattggtatttactttactattaaaacaaattttgtacaattcagatattttatagaaatgtttagacttctgggtgatggtacagcgaataaaaatgcaaaaaaggaaggaaaaatctcttcatttcaagcattttgtataagtacatcttcaagagttggaactggaaatatagctggaatagcaattgcagtggtagcagggggacctggtgctgtattttggatgtggcttatagcattaattggttctgcatcaagctttgttgagagtacattagctcagatttacaaagtgaaagatggtcaagcttttagaggtggaccagcgtattatatggaacaaggtctaaataaaaaatggatgggtattttattctcaatacttataactatatgttatggttttgtatttaatgcagttcaagcaaatactgtttcacttgcatttaataatgcatttggaataagtaaaatggctatgggaataggtcttggaattttaactgcaatagttatttttggtggagtgcatagagttgcaaaagtttctgaaataatagttcctgtatttgcaggattatatatattagttgctttggctatagttgtaatgaatataacagagataccaagtgttatagcattgatagttgaaagtgcatttgattttaaaggaatggcgattggtacatttatgggagttgtaatgactggagtgaagagaggtctattttctaatgaagcaggtatgggtagtgctcctaatgctgctgcaacagcacatgtaactcatcctgtaaaacaaggtttaattcaatctttaggtgtttttacagatactataataatatgtagttgtacagcattcatggtattattatattcaggttatagtagtagtggagcaactggaattgaattagctcaagaagctttaactcatcatataggaccagttggaaatatatttatagcagtttgtatattcttgtttgcatttagttctatagttggtaattactattatggtgaatcaaatatggagtttatgagtggaagtaagactaaacttaatgtatttagagtttttgttgtaggcatggttttatttggttcacttactcaagtagatgtagtttggaatcttgcagacttatttatggcattgatggcgataataaacttaatagcaatagcacttttaggaaaatatgcatttattgctttaaaagattatacaagtcaaaaaaaatcaggaataaaagaccctgtgtttattgcagatgaaatagaaggcctagaaaaggtatcagagtggcatagggaattatctgaggaacatttaggataaaaaatagtataaaattataaaaccattttgaaagactagagtatgtatatgctttatatgaatataatattgaattaatttatattactggaatttttaattccagtaatatttttttattatataatttagctttattaaaagtttttattattaaaaatagcttatttatcgtaaagtgaatgatattggttttttaattattatgaatgttggtatttaatttaaagacttaaataaatttgccatttctagcgcattcatagcacaatcataacctttatttccagcttttgtacctgctctttcaatagcttgttcaatattttctgtagttacgattccaaatataacaggtaattcactgtctaaagatacttttgctatccctttagagacttcactacatacataatcataatgagaagtagcccctcttataacacagcctaaacagattatagcatcatacctaccacttttagccattttttgagcaacaagaggaatctcaaaagctccaggtacccaaactatttctatattttctggagaaacgtcatgtcttaaaagacagtcttcagctcctgataaaagttttgatgttataaattcattaaaacgagaatttattatacctatttttaaatcttttccaataagttttccttcatatatcatttttatttcctccaattttatttatgttatagatttatatttataaatatctttaattttaattataaaaaactacttagtagaaaaatatcatcatataatcatttatataatatctaaaagatgtcccattttatcttttttagtttttaaatatagcttattaaagtcattaatttcttcattaatagggattctattttcgatttttattccatatttctctaattgatttattttatccgggttattacttaaaagatttatactttttatgtttaaattttttaatatttgagcagccatatagaaatctctcatatcttcttcaaatccaagcattaaatttgcttcaacagtatcgtaaccttcttcttgaagtttataagccttaattttatttaaaaggccaatacctctaccttcttgcttcatataaattaaaactccacttccattttccacaattttcttcatagaagattctagctgtaatccacaatcacattttagagagtggaacacatctcctgttaaacattcagaatgaagtctaactagagtattttctatatttatatttccataagtaagggcaatgtgttcttcatttgaataagtatctctatatcctatgatttcaaaatttccatattttgttggaaggaaagcactagatactttttctatagtagtttcatttattttgcggtattctataaggtcttttatagtgatgatttttaaattatgcttttctttgaaaatcattaaatcatcaactcttgccattgtaccatcatctttcattatttcacagataagaccaatctctttaaaacctgcaagtctagcaaggtctactgaggcttctgtatgtccatccctgacaagaactccaccagtttttgctattaaaggaaatatgtgaccaggcgttttgaaatctttacttgtagaattttcatcacagaacaattttacagtttcagctctttcatatgcagatataccagttagagtatctgctccatctatagtaacagtaaaggctgtttgaaatgtatctgtattttctctaaccataagaggtatattaagacttttaaattttttttcagtggcaggtagacaaattagacctctaccatatgtagccataaaatttattgattcaggagtagccatttcagctgccatcaataaatctccttcattctctctactttcatcatcaactacgattaccattttcccattttttatatcttcaatagcttcttcaatagtattaaacatgtaattcactcctttattatttttaaaaaccatttttaaataaaaaatctttatctatatttgatttatggttactactattagaatttaattccttgtagttattagccataaaattattaacatactttccaattacatcgctttctaaattaacaaaatctccaacattctttgtcaagagaatagtgttaattttagtatgaggtataatagaaaccttaaatatttcatcatctaaatatgatatagttaaacttacaccatcaatagcaacagaacctttgagtatcattgaagataaaagttttttatcaggtcgtatacttactaaaactgcattttcatctttttcaaatttgcagatagttcctttaccatcaacatgacctgttactatatgaccaccaaatcttgaagaaagactcatagctctttcaagatttaccttatcatttgcatttaataaacctaaatttgtggaacgaattgtctccatcataacatcggctgtaaattcattttttccgaggtttgaaacagttagacaaactccatttacggctatactatctccaagatttgtgccatctaatattttatttgatagtatggttacttttccactcttaccattagcagtaatttttctaagtattccaacttcttctactatgccagtaaacatcctaacctcctatatgaatgtattaacaaaaatttaatttaaaacatctgattctataagaatatcgccatctatcaaagttacattattgattgttaactgtgttgaatctgacaaatgatttattccttctccagaaacgaatgtaggtgcatctttaccacctataatcttgggtgatagaaataatttgactttatcaactaacttatttctaaagagactgtcattgagagtagcaccaccttcaactagaacagaatcaatgtttaactctcctaatttatacattacaaattccaaatctactaagttgttttttgaaggagaaattattgtttcaacattattttcttttaacatagataattttatactttctttgcaacatgtgaaaactatagttttactggttttatctttaaccaaattactattaagtggcaactttaggtgtgtatctattactattcttgtaggatgagacactttttcttgattgagcctgcaagttagtaaaggattatcgttcaaaactgtatttatgccaaccattatactttggtatttatttctgtatttatgagttagataccttgatgattcattagatatccattttgattctagtgattttgtagcaattttaccatctagacttactgctgattttacaatacaaagaggtcttttgttttttatatgataaaaaaatgcctcatttaaatctcttgcttcatcttctaatattcccacagtaacatcaatattgttatcttttaatttttttactccattaccacaaacaagtggatttgggtctaatgtagatattacaactctcttaatcttattttgtataattttatctacacaaggaggcgttttcccataatgagaacatggttctaagtttacataaagagtagagtcttttagactttgtttagcactgtttatagcatttacttcagcatgattagagccaaatttctcatgatatcctttgcctattatattactatctttaacaattacacacccaactaatggatttggatttacaaagccttctccatttttagccaattcaatagcttttttcatataataaatatctttttctttttgattcacaatatgtacacctcctgtttaattggataatttttaaacaaaaaaccctgagaattaactcagggtttagaataatctacaataaatgtttaataaaagtagaagaaaattgctctacaaaaacactcattaaatatcttcttccatccagactttactgtcggctttggaatttaaccaaatcaaccaagttttaccttggctcgcgggctataccgccgattgggaatttcaccctaccccgaagattaagtattaaatttatatttagaatgtatcataaattattttactttgcaaactatttttttaaaaaatatatgttaatatataatatagaatgtctataaactttgaaataccacgattgtgaatataaaaataaaaatttgaacataatcaggaaagaagtctaattaatttaaattaggagagtaatatatgaataaaaaacttttagaaatactatcaaaatactatggatatacaagttttagaaaaggtcaggaatctataataaattctatcttaagcgaaaaagatgtgttagctattatgccaacaggaggggggaaatcaatatgttatcaaattccagctttgattttagatggaatgacaatagtaatttctccacttatatcacttatgaaagaccaagtagatgccttaaagactatgggaattagtgctgcttttataaatagttcattaagcagcaaagaatttaatgaaatattaaataatattagaaaaaataattataaaatactctatattgctccagagagattagatgcacaagagtttattgagctaataaataataacaatgtaagtcaagttgcgatagatgaagcacattgtgtatctcaatgggggcatgattttaggttgagttatagaaggatttctgattttataaaaaatttgcctaaaagacctatagttacagcatttactgcaacagcttcagaagaggtaagaactgatataataaatttactgtgtttagaaaatccagattattatataactggatttgatagagagaatttatcaataaatatagtaaaatcatctagtaaaaataagtatattttagattatattcaaaatcataaaaatgagtctggaattatatatgttgcaactagaaaggaagttgaaaatatatataatggtttatctaagagaaatatatctgtatcaaaatatcatgcaggtttatctaaaaatgaaagaagtaaaaatcaagaagattttataaatgataatgtggatataatggtagcaacaaatgcatttggaatgggtattgataaacctaatataagatgggttatacattacaatatgcctcaaagtatagaaaactactatcaagaaataggtagagctggtagggatggagaaaaaagtgagtgtgtacttttattttctccaggagatgtacatatacaaaaatatttaattgatattggagttgaaaatcctgaaagaaaattatttcagcataagaagcttcaatacatgattgacttagtttacagtaattcatgctatagaaagacaatattgagttattttggagaaaattatatagacaattgcaataattgtagcaattgtttagtagagggtgaaatagtagataaaactatagatgcacaaaaagtcatttcatgtgtagctagaatgaaaagaagttatggtgttactactattgtagatgtacttagaggttctaagaataaaaagattttacagcttggattaaatactttgtctacatataacattatgagagattattctagtgaagacttaaagaattttgtaaatacattggtttctcatggttttttagatttagttgagactctaggcaatggaaatagaggtagttttcctactataagattaaatgagatgtctatgaaagttttaaaaggtgaagtgaaagtagagtttaaagaaattgttatgacaaaatcattggaagtagaggatgagttatataatgctttaagagaacttagacattcaattgcaagtgaagaaaggatagctccatatatggtatttggagatggtacacttagagccatgtctagtagttatccaattaataaagaagaaatgctagatatctctggagtaggagaaattaaatatcaaaaatatggtagagattttgaagcagtaattaaagaatatgtcgaaaaaaataatataaataaaaaaatagatgaaaaaaatgtcgatttaaagaacgttaatagtgatttcttagaggttaatacagataaagttttatatgaaaaactgttagtcattagagaagaatatgcaacaaaggaaaaattacctgcatatatgattttagccaataaggctttgaaagaaataagtggaagatatccacttgatgaagaacaattaaaagatatttctggcataggtggagtaaaatttgaaaaatatggagctaatattttggcagaggttaataaatatgtaaaagaaaataatattaatgttatttgggagaaaaagggcaaaaggaagttaatattagatggagaaagtagaaaaaataatgaaatagcattagatttgctaaatcaaggaaaagatatacaaagtatcagtcaagaaatagaagtttcattgtcaaccattattggatatgtgcatgactatgtaaaggatggacatagtatatcatttgaattaggactagaaaatttttataatgaagataaaaagaagatgattttagaagtttgcgaaaaagttggctatgataatttaaataacataaaaagaaaacttccagattcaataaagtatgaaaatataagagctgtgatgcttgactcttatcttgaaaacttaaaaaataatattatagcagagtaatttttaacttaataaaaataaaatttgtattattgtgttgaactaataattttgctgtgttatactgaatttgtaaaaataatgaaaaattagagctaggggcgctagaattggctagctgagagataaagccgtaacttacaaaccctaataacctgatcaagataatgcttgcgaagggaagctttttaatataattttattatataaataggcaaattattcaatgttaggagaaatttgtctaagtgtatatacgattataagagtgctttccaaacgaggaaaagcactttttttattttcaaaaactataactttaatcttggaggattgtaatatgaactatacaacacaaatggatgctgctagaaaaggcataataactaaagaaatggaaatcgtttctcaaaaagaacaggtagatgtaaatgaattaagagaattaatagcaaatggacaagttgttataccagctaataaaaatcataaatctttaagtgcagaaggtgtaggtaaaaatttaagaacaaaaataaatgtaaatctaggaatttcaagagattgtaaggatatagaaaaagaacttgaaaaagttagagtagcaatagacatgaaagctgaagctataatggatttaagtaattatggcaaaactagagaatttagagaaaaggttgttgaaatgtcacctgcaatgataggttcagtacctatgtatgatgcagtaggatatttggaaaaagaattaaaagatataacagaagaagagtttttaaatgtaataagacaacatgctattgatggagtagactttattactatacatgcaggtcttacaagaagtgtttgccaaaaaataaaaaatcatgagagattgactcatatagtatctcgtggaggttctttattgtttgcatggatggaattaaataataaggaaaatcctatttatactaattttgataaaatattggatatatgtgaagaatatgatgttacattgagtttaggagatgcttgtagaccaggttgtataaaagattctactgatggtgttcaaattcaagaacttgtagtattaggtgaacttactaaaagagcatgggaaagaaatgtacaagtaatgatagaaggtcctggacacatggctattgatgaaatagaagcaaatgtagtattagaaaagagattatgccatggagcacctttttatgttcttggaccattggttacagatatagcaccaggttatgaccatataacaagtgcaataggaggagctttagcatgtgctaaaggagtagattttttatgttatgtaactccagcagaacatttaagattgcctaatttagatgatatgaaagagggtataatagctgcaaagatagctgctcatgcaggagatatagctaaaaatgttaaaggtgctcgtgaatgggataataagatgagtaaagctagagctgatttagactggtgtgagatgtttagacttgcaatagaccctgaaaaagctaagagatacagagatgaatcaactcctactcatgaggatagttgtactatgtgtggaaaaatgtgctcaatgagaacagttaagaaaatattaaacaatgaggaacttaatctaatataatttttggctagtatgactggaataaaaagaagctgaaaagaggaggtgatttagtgaaggttaatgggaaggaaattgaatttgaaaaagatttgactgttatagatttattaaataaatataatttaaaaagtgatagagttgtagttgaagtgaatttagagataattgaagaatctaactacaatacatatgtattaaaagacgaggacattgtagagcttattagctttattggaggtggttaaaataaaaatatttgtaaatgaattattaacagatgttgaggaaaatacaactgcttataaagttagagatagctataacaataaatgtgatgtattggtgttaaatggatatccaattaaaacagatatgcccctttgtgaaaatgataaattaacacttatacaaaaaggagttaagccatcacttgatgaattggaaagcttgttgattgctagacatactccaaatatacataataaattaaaaaaagggaaagttgctatattgggattggggggacttggttccaatatagctatctctttagctagaataggagtgggagaacttttacttatagattatgatgttgtagaaccatctaatttaaatagacaacagtattttatagatgatataggaaaactaaaaactgatgccatgatagaaaatataaaaaaaataaatccatttataaaattaaataaacgagatatttttttaaacaagaacaatatggatactattaaggattcagatttaataattgaggcctttgatgatgcttcatgtaaagcacaggtatgtaattatgtattaataaatttaaaagataaatatttaatagcatcatctggtatggcaggttactatgattcaaatataataactactaagaagataaaagacaggttttatatatgtggggattttgtgaatgaagctaaatttggtgaagggcttatggctccaagggttgccatctgcgcaaatcatatggcaaatttggcaacgcaaatacttatagatatgtaaatattaaaattagatataaaaaagattgaatattaaaaaaatttaacgtggagggaaataatatggataaattggtacttggtggacatgaatttaatagcagattattggttggaacaggtaaatatggttcaaataatatattgcctgaggtaataaaagaaagtggaagtgaaataataacaatggcacttagaagagtggatttagacaataaacaagaaaacatattaacgtatattccaaaagagatgacaatacttccaaatacatcaggagctactaatgcagaagaagctgtaagaatagctagaatatctagaaaaatgggatgtggagattttataaaaatagaagtaatatcagatactagatatttacttcctgataatgaagaaactataaaagctacaaagatacttgctgatgaggggtttatagttcttccatatatgacaccagacctttatgctggaagaagacttatagaagctaatgcagccgcagttatgccacttggagctccaattggttcaaatagaggtcttcaaatgaaagaaatgataagaataatgatagatgagttggatataccaataatagtagatgcaggtattggaaaaccatctcaagctatggaggctatggaaatgggagctgatgcagtacttgtcaacactgctatagcttcagcaggagaccctgtacaaatggctagagcatttaaattagctgtagaaggtggaagagaagcatatattgcaaaaacaggaaatgtgtcagaatttgcaaatgcatcttctcctttaacaggttttttaggcaatttatagaaagtggtgattggtgatgagtttttatgatgtaatagaaaaatatagggattttgattttgatggatatttaaataatgttactgataatgatgttttaagaagtttatcaaaagacaagcttgaagattttgatatattaaatttgctttctaaaactgcagtaaaacatttagaagatatggcacaaaaagcacataaattaagtgttcaatactttggtaaaacagtatgtttatatacaccaatgtatatagcaaattattgtgttaatcaatgtgtttattgtagctataatataaagagtggaataaaaagaaaaaaattaactatggatgaaattagagaagagggagaagcaatttcaaaagaaggtttcaaacatctacttgttttgactggagaaagtagttttcactcaagtgtagaatatataggtgaggctatagaaatattaagagagaaatttccctctataggtatagaagtttatccaatggaagtagaagaatataagtacattgtagataaaggtgttgaaggattaacagtatatcaagaaacttatgacgaggaaatatataagagagtacatataaaaggcccaaaatcaaattatgaatttagactagatgctcctgaaagaggggcaaaagcaggtatgaggactttatcaataggtgcacttttaggtctaaatgattttagaaaagaaactttttttacaatattgcatgggaaatacttaaaaacgaaatatcctcatattgagctttcatattcaacaccaagaatgagaccttttaaagggtgttttgaggaattggtagatataagtgatactgatttagttcaagctatggtatgtatgagattatttgaccctcatgcagctataaatatatccactagagaaaatttagaaatgagaagtcatataatacctttaggagtaactaaattgagcgcaggtgtatctactgatgtaggaggtcattctcaagatgaacatgatactgctcaatttaagataaatgatgaaagtactgttaaagatgtggagaaaatgctaaactcaattggttatcagcatgtgtttaaagattgggaaagattttaaatgtatctgataacaaacagaaaattatgtagtgaggaacgatatttagaagttattaaagagtctatattgagtggtgtagaaaatataataataagagaaaaggatttggaatatcaagagctaagaaaattatatatgaaaataaaaactaaaatcaattgtatagattttcaagagcaaatatcagatgaaagtttgaaaactaatataaatcaaaaagagtgtagaaataaattcaaggttaattttataataaatagtaacattgaattttttgaaaaagtggattgtcaaggtatccatcttccttttaaattattcttgaatttaattgaaaataagtataattttaatgaaaataaaatactaggattatctttacataaagtagaggaagtagattatttagaaaaattaataagaaatcaaaatataaaaatagattacataacattatcacatatatatgaaactaaatgtaaagaaggattaaatccaaaaggaattgagcttttaaaagaagctaaaaagattactgatattaaaataattgcacttgggggaattttaccatctaatgtcaaagaaacattaaaatactgcgatgattttgctataatgtcaactataatgaggtctaaagatattaaaaaaaccatatcaaattataatgaaaagttgaattagtaaatatagtatattgaatttttaacttaaataaaaataaaaaagttatcttttaaattttaaaaggtagcttttttattttatatctttgctaataaaaaattgtaaaaagggaaaactttagtcagagagattaaacaatatcctagaaagatttaaaatttagtaaagtatggaggacattataatgactgacagtaaaaagaaacgatttattataccacacacttttacaataatatttttactaatagtcttgatggcaatattgacttggatagtaccaagtggtgaatttagtagagaagatgtagaaggtagaatggtagttgtaccagggacttatcaaagtgtagaaagtaatcctcaaggatttgcagatgtttttaaagcaccaatagaaggctttatagattcagctgaagttgtaggttttgttttaatagttggaggtgcttttggtattgtaaataggactggagctatagaagcaggaatagcttcggttatctctaagtttaagggaaaagaacttcttataattccaatatcaatgattttatttggacttggaggtacaacatttgggatggcagaagagacattaccattttatatgatatttgttccactcatgacatccttgggatatgattctctaacagcaatagcaattgtatttataggagcagcagcaggagccgccgcttcaacaataaatccattttcagttggtattgcacaggcactagctcaacttgctcctggttcaggagtaacttacagagtagttatttttatagcatatatactaataagtatagcatttgttatgtactatgctaagaaggtaaaggaaaatcctgaaagttcaatagtatatgaaatagataaaaataataaatcaatacttaatcaaacttcaacagaaataaaagaatttacttttaaagaagtatctgttcttgctatatttggaatagggatggcaataatgatttggggtgttttaagtcaaggatggtacattccagaaatatcaatgtgttttgctgcaataggtgtgctttctggattggttggtagattatctcaaattgaaatctcagaaagttttatagatggagcaaaagatttagcatctgcagctcttgctatagctttggctcgtggaatcgtaataattgctcaaaatggatttataatagatactatattaaattccgcagcagcctttctaggtgggcttccaaaggttatatttgtatatttatcatttttcttggaagctgcattggcatttttaattccatcatcttcaggtcttgcttcacttacagtacctgtacttgctcctcttggtgatttggttaatatatcggctcaagtgatagtaaccgcttatcaatttggtgtgggtcttacaaactttataactccaacttcaggagtactgatgggagcacttgcagtagcccatattccattttcaaaatgggtaagatttataatgcctatcttgttgattttgacagctgtatctctagtctttttaacaataggtatttatatagggttttaattaagtgtagttttatttaagatatttagtaatggtataaaatgataatatgttttcaataaattgccactaatttaattagtggtaatttattttttgtatttaaaaataaatgtatttacttgtattttgaattaatatctacttagacattgttttaattgttatattttcatttaattaagcattgatttatcgttttttatatttcatataacaatgcaaaaaataatttttatatagtaaatgacaaaagtttacaataaatgtatattttcttactcattccttaaaattactcatttagtttaataactctcatttcatatgtaaagttggtaaaaaaattaaaattaaaagtaaaaaactaaataaattaatgttaatttgaaatatatatgaaggtttttggagaatacttacttatgataggaaaaaatgttaaaataatagtgtaatcaaatataaaggactgaaataattaacagttattaaatattaggagtgtaaaaatttatgggattaaaagaatttgattttattgaagagtctattgatatgttgaggacaatgtcaccaacattagaaactatatcagatgaaatagaagagtattttgaaaatatcttggatgaaaagaatcaagaatatataaatgtaacctctagaataaaatcagaatcaagtttaagagaaaagataattagaaatagatatttaaaaaaatatggagaagcaagtaatcttattcataatgtttctgacttaataggcctaagaattgagtgtagatttattgaggatgaaaacaaaatatatagacttttgagaagatattttaataaaacagatgacaaaataaactattataataaagagaataagaatattaaattaaaactatctgagaggcaacccaataagcaaaaaaatggatttgaaatatataaaatagatggagtttttgcgtatttagatagagaagtaaaatttgaacttcaaattaaatctcttgtaaatgtgttttggagtgaaatagaacataaaataatttataaaaataatacatatttacttgctgataaatttataaaggatatgatggactctataaagaataatcttactatgatagataatcagcttttaagtatttataaaaactttcattcagggaagtcttttaatatgaaagtaagtaaaaaagaaattgaaaaattatttgcgaaactagtctatgacgctttttctgaaaagatgaataaaagtataggttttgttgtagattttaaaaaaccatgtgaaactatattgaactattcttttaataaacaagatataagtgatgaagttttaggtaattttatgcttgatgagtttgcaagattaaatgaaattgtaaacaaggatatagattttaatgagcaaatagaatttgaaagagaaccaacatttgatgataagttttgtaaagacctaggaaatcattttagaagtagattaaacacagaatttccatggaacctattttttagaatattatttgaaatagagccatataacaataccaaagactttgaaaactttgtagagtttataaaagaaaatgtgctactagaagaaaatagggagcaattattatgccaatttgaagaagatagcaagcttataattgaagatatatatgattgtatatttaatagtataagtgagattgatagtgttgaaattttatataactataatcttgaaaaaataaactttacatcaagtgaaatcataaattgtatatgtagagaatatgagtgttatggtgaatacttagaagaaaaagaaaagcttatgaatacatttaaagaaaagattattcaaatctttgagtaataggtcaatgctgaagtggcgctaatgcgccatttttcaaatatatatgaattaagtaaaattattttggaggaggcgatttgtatagagaaaacaggtgtaattttggcagggggaaaaaattctagaatgggtagagataaagcctttttagagttacatgataagctttttattgaaattgcaatagaagcatttaaaaactttgatgagttgataataatatctaataatgaagaattatattctaaatacgatattaaagtttataatgatatagtaaaagatgttggtccaattggaggaatatatactgctcttgaatatgcaaagtatgatatagttacaattgcatgtgatatgccatatctaaataatcaaatagtcgaaagaatagctaataaaatgaatgataaaagtgtgatttcagtgacaaatggaaagttacaaccattgtgttctggatataaaaagagtataataaataaagtatctttatgtataagggaaaatgatttaaagctcagaagctttatagataaaatagataaaagttatatatactttgatgaagaagatttatttttaaatgtaaacactgttgatgagtatgaaaaattaactaaagtttaattagctatggttgtaaaatagagtaggatttatatggaggagagtttatgaatttacttaaatgcgattcttgggcagtaatattaaataatagcgataaagaaagtaaagcatataaaatattagatgaacttaaaaggaatatgtacaaagttgttgctatagatgaagagaaaaaacctattgaaggaatagatgtgtatgaatgtttaaaagatgttccacacaatattgatgttgtagctattattgataaacaatctaagatggatgtgattttagaagaagtagagcttttggatatacaaaatatgtggtttgaaaaaggaagctttagtgaaatgatgattaaaaagactaaagatttaaaattaaatatagaatataatttaagtttatatgatgagttgactagataaaattatatttcttaataataaaaatataattagttaataaaacatattattttatagtatagattggttaataaaagtacagattggttaatgaaacattaaattacaatatttgttaaaagaattgtgagttacatgatataatgtattaaataggatactaaggagttgatatattatgttaatagtaactacagaaaaagtagaaggtaaaaagatatcaaaggttttaggattagtgagaggaagtacaataagagcaaaacatgttggaaaagatataggagcaagttttaagaatcttgttggaggagaacttactggatataatgaaatgctcactgaagcaagacaaattgccataggtagaatggttgaagatgcagaagctaaaggtgcaaacgcagtaatagcatttagactgtcttcagcttcagttatgcaaggggcagcagaaatgcttgcttatggaacagcagttgttttagaagatgataatagtattcttgaaaaataaaatataaatagttaaaaagaggcatcttttaaaaattttatggatgcctttttttatttgaaaaaactaatttgagaagaaattttaactattatgacaataaaattagggtgatattatataaataagtaaaattatattatataatgtatggtatagactttaaaaattttatttgtagagaaaaatatggacaatgttataataattatagaaattaaaagtacttacattcattatgtatgtgacatgtataattagttttatatttaatacagttttgaagtaatatcttcattttgagaacgttggaataataaaaaatgtatgtattataggtgatataaataaaaaataaatataatatgttatattgctgatagaaaagagaataaaagaaaataggttttattaaaagagatttttatttataggacttaatcaatgtatagaggggtgagaacatatgtttaatgttgcaattataacacttagtgataaaggatatgaaggaaaaagagaagatataacaggaaaaaagttaactgaatttgttgaaaatacaggagcttataaagttactgagtatgtacttataaaagatgataaggaaatgctaaaggaaaatattataagactttgtaatagtaataaaatagatttaattcttacaaatggaggtactggtttttcaaaaagagatataaccccagaagcaactaaggaagtgttggaaaaagaaataccaggtctgagcgaatatatgagaatgaaatccacagaaattactaaaaaggccatactaagtaggggtgtgagtggaataagaaataattctataataataaatttacctggaagtcctaaaggtgcagttgaaaatctaagttttataattgatgttttagaccatggcatagaagttttaagaggagaagctacagaatgtgccactaaaaaaagtgaatagtatataatctagatagataaaaaatagacaaagaggtagataaagtatgattgataagtatggaagaaaaatagactaccttcgtatttcacttacagataagtgtaatttaaggtgtgtctattgtatgccaccagatgtaaaatttgataaaaattatataaatgaaaatctaagctttgaagactacaagtttattataaaggctatggctgaacaaggtataacaaaaattagatttactggaggagaacctcttttatatcctaaattaaatgagcttataaaatttacaaaagaagaatgtggaataaataacataggaatgactactaatgctattgggctttctgatagaatttttgagcttgaaaaatgtggcttaaataaagttaatataagtttagattctttgaaggaatataagtataaatccgtaacaagaggaggaaacttaaaagatgtcttaaaatcgattgaatcttgtttaaacttaggtataaaagtaaagttaaattgcgttgctataagtgggtttaatgatgatgagcttaaagattttatgtttttaacagttaaatcaccaattgatgtaagatttatagagcttatgccattaggtgaggctaatagagtttataagaagggttattttaatgtaaaagaaatgattgaaaaaatatatggtttatataaagtcaaaaatgatgaaaaaagtacagcagaatattatatgtttaaaggagctaaaggaagaataggaattataactccattaagctgttcattttgtaacacttgtaatcgtattagacttacttctagtggtgcaataaaattatgtctacattcaaaagaagaaatagatataaaaccatttttacataaaccattgttatttagagaatctatgaaagatataataaaacaaaaaccagaaaaacatcatttaatagaaaataaatgtagtgatacaaataggcgtatgtatgaaattggaggataagtaatgttaacacatataaatgaaaaagggtatgccaagatggtggacataagtgaaaaagatgatactaaaagaacggccgtagctacagctacaattactcttagtaaggaagcattagaaaaagtaaaaaatggtcagataaaaaaaggagacgtattgtctgtagctcaagttgcaggtataatgggagctaaaaatacatcttcaaacataccaatgtgccatcagattaaattagttggatgtgatttagaatttgatgtagatgattatatgtctgctattaagatatacgcaacctgtaaatctcttgggaaaactggagtagaaatggaagctttaaatgcatgttctttagcagcacttacaatttatgatatgtgtaaagcagttgataaaaaaatggttataagtaatatccatcttgtggagaagactggtggaaaatcaggagattttaagttcgagtaaattaataatatattgggttaaaatttggaggaaatatggcgaaggtagtgtcaataaatataagtgagaaaaagggtgtaattaaagttcctgtaccatgtgcagagctaaaaataaatcatgggatagttggagatgcacatgcaggaaactggcatcgtcagataagcttacttggaaaagaaagcatagataaaatgaaaatgaaaggctttgaccaattaaaatatggagattttgctgaaaatgtaactacagaagggatagaagttttttccctgcctgttggtacaaagttaagaatagggcaatgtgaagttgaagtaactcaaatagggaaaaaatgtcacaatggatgtgaaattaagaaattgacaggtgactgtgtgatgccacgagaaggaatttttgtaaaggttctaaaagaaggaattataaatgtgaatgattcaatagatgtaatctaatgaagtcactattaaaatataattataagtaaatactattaagatttaaatatatattttaagagagaattaatttaaataaaatattttagttataaattggaatattggttatataaagctatgaatgtaaaatcatagctttttgtttttgaattttaaaatataatattttatttatatatattaaattatattttatataaaatcaattgtttaaatatatattatttatactgtaaatttatagataataaagtataaaaaaaatatattttgatgaaatttaaaaaaatacattatataaatatagtaatagtatgaaaatttacatataaaactaaaaaatgtaagtaattgactttttaagttgacaaaatattgcatatatattatgatataaatcataaattaactacaaatcaatattatatattcgtagaagaagaaagtagcataaaggaattttacagagagttagatttggctgagaactaatattggaatttatgtgaaaaggactttggagaatactattgtaattatgttagaatagtggtttaattcgccttaagaaaatgagtgagtaaaattaatttttactaataagagtggtaacacggatttatattcgtctcttggatttttccaagaggcgttttttattataaacttatttcagaaaatttaaaactatatattaaatgaaaattataaaaatatgatagttaataaatttataaattagaaaattgtaaaatatgctaaggtcagtagttttacgatttaaatggagggatgaaaatggaagaagaaaaaattaactatgctctggaacagattccagagaatcaaaaacgtggttgggtagctatgttttcagttttagtagcaataggtgtggatttatcatctgttattttaggcgctgagttggcacagagtatgccaatgaaacaagcaatattgtcagtaattgttggttcatttttttctgcaattttgtatactacatgctctttggttggttcatctacaagtttatctacatctatgataacaaagtatgtatttggagaagctggagcaaaaatattttctctagttataggggtttctctattaggttggtttggagttcaagtaggtttctttgcacaaaatgcacagataataataaaagatatatttaatttagatgtcagtatgcagattttaagcctaataggtggtctcttgatgatgagtactgcaatttatggatataaggccatggagaagttgagtgtgtattcagtaccatttttattagttcttatgatgctaactatattcttagcttttagagcaaatggaatttcagttgatgataatatgaaatctactatgacatttgcaggtggagtttctctgtcaatgagtataataatagttggtgcaattgtatctcctgatataagtcgttgggctaaaagtagaagagactgtgctctttcaagctttttgggaatacaatttggaaatgcttttatgataatagtttcgatagtattagtaaaatgtatgggaacttcagatattatgagaatttttattacattaggaattgctataccaggtataatagtacttacattagcacaatggactacaaatacaagtaatgtatattcagcatcattaagtatagctcttgtacttaagaaggctcctgagaaagtattaactatagtccttggtattatagcaacattattggctgtatttggaatatatgaaggttttataggatttttaaatttacttggaattgtaattgcacctgttggtggtgtatatacagcagaatattacatagtaaagcaagaacttaaaggctttgataaaggagtattatataaaccaatagttaaacgttcaatagtgtcttggataattggtatattaataacttacctttcaacatatggatttataactcttactactatagcacctttagatggttttatagcagggtttgtagtacaatctattattggaaaagtgctttgttcaacaaaaaataagcaagaaatagacaaagcagtataaagaaatttgtttataaagtataaaataaattagaaatatgaggagaaagtaacatgagatttttaacagaagaaagtgtagataaaatagcagttggtgcagcagtgcttggaactggaggtggaggtgacccatatgtaggtaaattggttgcaaaacaagccattaaaaagtatggtcctgtaaaagtaataagtttagatgaacttgatgatgatgctttggtagttccagtatctggtatgggttctcctgtaattacaatagaaaaattactttcagaagtagagttaactacccctttagaaataatggagaaattattaaatagaaaagtggatgttataattcctatagaaataggagggataaactcacttatgcctatagcagttgctgctaaaaaaggacttcctatcttagatgcagattctatgggtagagctttccctgaagctcaaatggtaactttttatcttgaaggatatgaggcatctcctgccgtaatgtctgatgaaaaaggtaattctgccatcctttatcctgtggatggaatttggtcagaaagattagctagaactttaactgtagaaatgggaggaagttcttctattagtgactataatttaagtggagctcaagttaaaaaagctgctataggtaatactcttacaatagctgaaactataggagggtttttacttgaaaataaatctgattcaaaaggtgctgttgagaatatactaaaagaattgtgtggatacaagttatttgaaggaaaagtaattgatattaagagagagttgaaaggtggatttactagaggacatgccttttttgctgggattaatgagtatgatggagagtattctatattattccaaaatgagaatttaattgccaaaaaaggtgatacaccactttgtattacaccagatttaatagcagtattagatttagaaactggatttccaataactacagagagaataaaatatggctctcgtgttatggtagtagcttttccttgtaatgaaaagtggagaacagaaaaaggaattgagacagttggacctggatactttggatatgatgtggaatataaaacagtagaagaattacaaggaaaataaaagtttaggaggaaattttgatgtatcgtgtaggaattgacgttggaggaacaaatacagatgcttgtatactggatggggaattaaaagtaattcattcagttaaggtggcaactacaaaagatgttgaaactggtgtttacaatgccttaaaaaaagttatagatgaaagtaagattgaccattcattaataaaatatgctatgcttggtacaactcattgtacaaatgctattgtagaaagaaaaagacttaataatgtagctatgataagaataggaaagccggccactactgccattcttccatttatagattggccagaagacttaagagaaaaaatagaattagattcaatattggtatctggtggatatgagtttgatggtagaaagataaatgaactttgtaaagatgaagttgtagagttttgcaatagaataaaaggcaaagtggaaagtgttgcaataagtggagtatttgctccagtaaataaacaacaagaagaagaagttgcaaaatgggttagagaaattttaggggatattcctatatctttatcaaatgaaataggtaatataggtatattagaaagagaaaatggagctattttaaattctgcattgtctcaagtaggtaaagctgtatctttaggatttgaaaaagcacttaaagacttaggtatagatgctcaaatatatttcagtcaaaatgatggaacattaatgaatttagagtatacaatgaaatacccaatttttacaattggatgtggaataacaaattctataagaggagcttccttcttatcaaaagtaaaaaatgcaatagtattagatgttggtggaactacaagcgacttgggtgtactatataatggattccctagagaatcatctattccagttacaattggaggagtacatacaaactttagaatgccagatgttttaactattggtcttgctggtggtacatgtgtaaaaggcgaaaaagataatataaagataggtcctgaaagtgtgggatatagaataactgaagatgcaataatatttggtggagacactctaactttatcagatgttgttacaaaattagatatggcgtttgaagatagaaaaagcaatgttgaaaacttagataaagagtattgtaatgaggtatataagaaggttattttaaaattagaagatgctgtagaccaaatgaagactagtcaagatgatgttgaattggttttaactggtggaggaagtataattgttcctgaaaaactaaaaggcataagcaatgttataagacctcctcattatactgctgcaaatgctattggtgcagctttaggacaaataagtggagatgtagaaaaagtatacagtttagataaaatgtcgagagaagatgccatagaagatgcaaaaaaagaggctgtaaataaagctctaaaagctggtgctaaagaagatactatagaagtattaaatatagaagatgttccacttgcataccttcctggtaatgcacttcttataaaagtaaaagttgttggtgatttaatttaaagaataaatataagtatttccagaattatataaatatttctggactcatttttaaacttattttatcaataaaaacagcataacttttgactatattcttataagtttccgaacagccgatatatacctattttttgaggtttatcggctgtttgttatcttttatcgcattccaactatttttcttaccgtatttgctgtacgaattgtaatcttatcacttacatttgaactggcagtctttgaccaccaatttgtctttttataatctttacgactaaaagaccaaaagatagcatttttataatgatatactttttcatactcttctttaggatttccaacctcatcataaaactcgtcataagataagtcaggaaacataaaaataagattatcatatatttctttgttgttatctccccaccaattaggagcattatttagtatatcttttaactcctcttgtgaaataataaaaactggtatttccaattcaaactgtttttttatcattaatcttattgtatttgagataaccttgttgtcatctacatcacttaaaaagacaacattaccactattaaggtatgtagaaacttctgaataaccaagttctacaaagcttgcttttaattcagacataattatcttgttcttaccacttatattgatacctcttaataatgcgatataacttttcatataataagttcacctctaaacattcacatttttctatgtagtacaaactggaatttgcatcttttataattctttcaaaacttcttcatatgtaatttttttaatataaaaaaatcggtgcttaatttgtaccgatttttatttttcttagtaaagaactcgtttttttgcttctgctatagctctagcagcactttttgcttgcattcttttttcttcttcttttttaaattcatttattgtttcatttagattcttatcatgttcatttttttctttatcttcgttttctctgtatactaatatataatctattattgattcgtttattatctgagatatacttttattttcattaattcctattctcttaacttccttaagtagagtctcatcaatatgaaccgttgtttgctttgtattttttgccaccttaatcacctcttaaaaaaaattctaacattaaaattttttttagtcaataaattttaatattaaaattctttaaatgttttatttgattttctaaaattttctattgtatttatcatcttattttttatattttcacctagtacagaagactttagtctaggattttctatatggtcataaattggttctaaaaattcgacttcgacaggaacagagttaattttaccaataggttggtatccttcataagtatcttttgaattttttattacgagtggaacaatagggcattttgctttatatgctatctttaaagctccacttctaaactccgaaaccaatgaatttggttctttaatccatgttaaatctccttctggaaacactgccatactttgacctgtaagtatattttgagaggcttgggctatactctttataccctcacgattgttttttctgtttacatatacacatcttagtaattttgcccattctttaaatataggtatatttctccaaactggttcatctgcaattacacatccaattggtctttctacacttgctgttagtatgaagctgtcaagcatactagaatgatttacaacaaatagaagtggttcttttggcagtgtttccttaccaattatattaagctctatgttcactatatctaaagattttttagcttgtttttgcataaattcaaatttttcctttaagctaaatttatcaggattctttttaattttaataaggctaggtatagaagatgtaaaacctataagttgatatgtagcaaattttaagtaattattcataaaattatctccttaaaataaaattatttattactgtaaagattttaacataaaataaaatttaagtctattttaattcaattttgtaacatatattttaaatagacagagattgagattttatatttctaattttagtaatcagattttatcaataaattactattctattaatttaattaaataacctttaaatttaattataaaaactgttgcagaaatttctacaacagtttaaaaaatttaccttacaaaaacttattttataacaagagagtatattataaggctagtacagcccattttttgcactgagaaattcttttgccatcatcaccttgttctttgtcatatgcaaattgattaagcatttcacatggaaatgtatcacatagaccacaatgtataaggtttttatcttcacaacaagattttacaggacattgttcaccccaaaatggtttctcaatatctgtacaacctttacaattgactttttccttgtatccacattcataacataaaattccacatcttgattctatcattttaagtcactccttaaatataaattttattatgattgtatatcaaaatttatacttttcattgtaaaaatcggacaaattttttatataggttgttggattaacaccacaaatagatttaaaatcatttataaaatgagattggtcgtaataaccaatatcttgtgctaaagttgcaaatggtcttttattgttttgtacttcttgtaatacaaggtttatacgaagtaatctaaggtatgatttaacactcatcccaagagaattattaaaaattctatttaaatgtcgttcactataacaactaatttgtgaaatgtttttaacagacataatagagttctgttttctagcattttcaagaattggtatagtcatatctactatatttgatttcaataagtatgataagaataacatatctaattgttctactaattcctttatagtacttgttctttcaaaaatggaattaacctctaagctaaataatgtgttaaaatcttcaagtgaaatttttaaatctgtagattctctttgagaaagacctgtcaaataatatactccacctgggcgaaactcaacgaatactctaaaaagtacattttctatatcattttttacaatagtagtttttgttgtggctccccagaatgcgctttctataccttttttgtcaaatttaaatatcatacatccactagcatcaggtattaatgtaagcttttctttaatacttgtatctggaatagatattgtatagtgtgctatatactgtcttaacaatttatgtggcaaaatatatgtatactgtttgcaggtatttaaaatgttattgattattttattcataagtatatcctcctgatatataaaaaataagtatactaatttattttttatataataaaccagttttgttttaattgaaatattctaataagatattttgttaaatttagatacaataattgtaaagtaaaatctcaaaatatacaattattataaatcatagatatttattaaataaatatattaaagaagaaggaatataaaacaagattagaaaataatagtgttactttcataataaatacatataaagatatttttaagaataaaatttattattaaataaaaaataaaggagagtgatttaatcgtatggcatcaaaacaaacaccaagaaacaatttagaaaagtttttaagaataagagtcttatcacatacaggcgataaaatacatataaagttacctgtaaattttgcaaaaagaatgattgagaataatgctttggatttatttaatggaaaagatgatgtagtagatggtaaaaaggttactgaaatattagtcaaagcatttgactatgatttaactggagaagtagttcacttggagagaaaaaatggagatattattaaagtttcaattgtacaatagaattattttatatgaattttatttttgaatagttataaataattagaaatttgtaaaaaagtataatatattattagtaatggtgcagaatacacatttataatttatagatgtgtattttttgtttaaaaaatttaaatatataaaactataaaggttacaattttggaaatagatgtaaatatatgttctattgtataataagagtaatataaaatctagtaaaaataatcaaataaatttaacttatgagagggataactatggaaaataaggattttaaattaacaatatgtatatttgcttttgtaattggagtagtagtattattctgctgtataggtttgggtgaatttagtgcagagcatattattcaacaaaatggtggaatcatggatactgaccaatataatatttatctagaccaatctatttctcaatatagaaattttggttctatattagctctgttaggaggaatagggatattgtttgataaatatatcagaaaatactagagattatgttttgtctaaaataaattcttatgaggagataaaaaatggcaacagaaatatttactgtaaaaattacacccttagaagcacaaaaaatgataaaagaaaatattgatgcagatttagtttttagtgattcttataatttaggagatgataaatttatactaattacaacttttgagaagtattacgcaagaaataatagtgatgcaggattaatcgtagtttatgaaaataccacagaaaaaacagttattaaagctacttcaacaggcagtgcaattggagttttaaaaattgattggggtgcaggtggaaatttacttaaaagagtaaaaaacatacttgctgaatatattatttaattattttatctaactgataatatgtcaagaaaatctcgtaaaagaggttaagaatatttttataatatatagataaataaggatttgaaggtaaagtttttaatgtataaagaaaaataatataataaaacgaattggctttataattctttataaggcaaagagtacatttctttatataattgttggatattaaataatatgtaaatacaccatttacatataaaagtttaattaatatgttaaaagaaaatgaaatggaaattactaaaaaatacttttaaattggataatgattgatattacgtttatacaaaaatcaagtagaattttatatattttaaatatgatagtttaaaattatgaaagaatgataaattccagtttgtagggtagttttgataaataatattaataaatatgagtaaaaagtaggagcatattaatataatattcctacttttttattattaaaattgtttatgatatcaacactacattaaaacacaacctaaatttgaaaaacaaatagtttagaaatatgtactttttttatttattatattcttttaaatcgaattttttcatctgaacataaagtctcaaatctatatgcatctgtcatctcataaaaaccaaaaaatataaagccatcacgagaagtaaattcatattgtatattttcaattttcaacatgttttctacttcgcttattttttcgctatatataatttctaccatataatttatcattgtagaatccctcctattaatatgaaaatatccaaatatataataacatatttagatgatataatagtatccaaataaaaaataatcttattacattattgaatgaagaattaaaatgaagataaataaaataaatattggttataattgattaaaaaatagttatgtatacttgtgactttagttatgggcagttcaagttttatgaaagaagtcatatatatatggaatattctaggcagaagctgtttaataataagagaatactataaaaatttgagtattacataaaaaataagaagccataaatgatataagcattatctatagcttcttacttctcattgattaagattatatataaaaataatcactatattttttgtttaagttttaatacttgttttactatatttgttgagtggtcagaaattctttctagattagtaagtaagtcaagataaagtacaccagcatcaattgtacaatttccattatttagtctaatcatatgtgaatttctaaaagttttttctaaataatttacttcattttcaacttctaaaactttatttgctaactcaaaatctttaacatctaaaactattaaggcatccttaaaattagtaattgtcttattgtatatttcgtatatttctcttatcgcactatcagaaaaactaatgttcatttccttaacactcatggccaattcagctatattttctgcatggtcagagactctttcaatgtcatttacagtattaaaaagcaaatctgttctaaagcgttcatcgtctctaagaggttctttagaaagttttaacaaatagttcaatatatctttctgtaacttattgacaactttttctgactcaaaagctttattaatatcttcattgctcttatttaaaaatcctgcaattgaatgttccaaagagtttgtagctttatgacccattcttacaacttcttgtacagtattaccaagtgctatagatggagtgctaaacatcctttcatctaagtacttagtattatttactatttctgattcagtttctttaataggtataagtctatttgctaatttaactatgtatttagaaaatggtaataatattataacatttgtaagattaaataaagtatgtgcatttgctatttgtctagctgtatcagttgggtcaaaatgagtaactatggctgatataggtttatttaaaacaagcataaatattattgtaccaatgacattaaaacttaaatgcattacagctgcacgtcgagcatttctacttgcaccaacacttgataaaagtgaagtaacacaagtacctatattatctccataaagaataggtaaagcagatgatagaggaagtattccttgagaagctagtgctattaacatacccatagatgcacttgaactttgaacaataccagttatggcaaatcctgccaatatacctaatacaggatttttactaaaatataaaagtgcatcagtgaatgctttatattcagcaagtggagctactgcatctttcataaactccattcctgtaaataatataccaaaacctataagtatctcagataaatgctttgttttttgatttgatgtaaataaatagaataaaatacctatacctaaagcaattggtgcaattccttcaagattaaatgaaactaattgagcagtaactgtagtacctatatttgcccccattattacaccaatagcttgacttagattcattatacctgcatttacaaatcctacaaccataacagtagtagcacttgaactttgtataatacctgtaacgactgtacctaccagtacacccataacaacattacttgttaagagttcaataattttttttaatttgtctcctgctgatttttgtaaaccttctcccattaaactcattccgtaaagaaaaagtccaagtccaccgataaggctaattactatattcacgatatttcctcccttaagaaattaatagtttttttatctgaattataaactttattaactaaaatttattgtttccataatatagaataacaaattttgtcaatagaaatattaatgttttgttaagtatacgttaagagaatgttaaatttttaagttgttgttaattttagaaaatttatgatatatagcaatttaaatacttgaacttagatttttagtattttatgtacaatcaatttaacaaagaattaactataattgtaaaaaatatgtaaaaaaatagcatccttttagaatgatattttttagttataaatatttttatattcaattggtgtaaggttattaaactttttaaaaattatactatagtaattttgactattgaatccaattagtacagtaacgtctaaaatagacaagtctttttttaatagatactttttgtttttttcaactctaactttatttaaaaaattagtaaaagtatatccactttttttcttaaacaaagaaaaaaataacttttattaagttgtaattcattacatatattacttactgttatatcttctgagtagtttttgtgaatataatctatagttttctttaagttttctttacataaaactaagagttggtctatgtttcattttatcaaggcatatttattaaaaaatcaatctctatttgttaaaataatttatgaatgatgttagaaactgtaatatattggatataatataataaacagataaactctgtattaagaggatatatagtttatcttaattataggggaagtgaggatatattatggaaagattaatggaactcatagaaagaaaatttttaaaggatgtagaacttttagaattagaagacatagaaaatgtaatagaatgcaaaatgacacagccatataatgctcattataatgaatacttagtaaaagtaaaaaatggagatgaagtagaagaatattttgtgtatttaaaacatagataaacataaaagaggtttatatttatttgtatgattataaaataaatacaagcctctttttttgataaatataaaattataaaatttttatttatttaattttttcaacaacattagtcaatattgaatctaaatcatcactaatttctgtaactccattatgagtaatatctataatttctttagtcataggaagttctcctaaaagctctaagtctaaatcatctaaaaacttttcagtagattctccttcaaataacttgatttttttagaacaatcaggacattggatataactcatattttcaataactccaaggacatttatgttcatttttttagccatattaacagcttttgatacaatcatagataccaaatcttgaggtactgaaaccataactattccacttataggaatagattgcataaccgttaaggcaacatctccagtaccaggaggcatatctattaataaatagtctaattcttcccaaagtacatcagtataaaattgctttacaactcctccaagtaaaggtcctctccaaacaacaggttcattctcatcatctatcataaggtttatagacattacttttatgttatttgagttttctacagggtaaatataagagccatcagaataagcttttacattttttacacccataagtctaggaatacttggtccagttatatctgaatctaatataccaaccttatatcccattttgtttagcttattagcaagtaaagcagttacagttgattttccaactccacccttcccactcataacaccaattatttttccaaatttattgttagggttattttcaatagaacaatttgattgactattacaatttccctttgatggacatgaattacaatctgccatatctattacctccaaactttaatatttattagattatttgtaacctacatatactattttagtacaattgaaccataaagtcattatttaaaagcaacttagaagattttctattgatttattcatagactatagcaaaaagaatacaataaaaaaattataacattcttgaaaaagtgattatttcaatttagttatagaacttagtcatataaatatatagaaaatattttaatatattatacataacgggttattttataagtttaactataaattaggtttatattttataaaaatttgttaaaaaaaacaattaaaaattgtaaagaaaaaagatataattagaactgtagtaataaatgttttattatagataatagagttttaagtatcttaaataatatttggaggaatatgaatggaattaagaccaagaagtgcaaaattagaagaatttgataaagtaatagaattaataaactatgtatttagaatatcaagaaatcataagccaactatgatggaagaatttcctcttttactaagtaaaaataatatagaaaatatgattataatatcagaagatgataaagtggtttctgatgtaaactatctaattcaagatgtatctattcaaggaaatagattgaaggttgcagctataggtggagtatgtactcatccagattatgaaaagagaggctattcatctaagatattggataaagtagaagaaaaaatgttttatgatggtgtagatattgtaattatatcaggaacaagaagtctatacagtagaagaaattgtagtttggtaaagagtttttataaatatacaataaaacctgaagatgtaaaaatagcatatgaaatagttgaatttgatgaaactaattttgaaaaagatgatgatttagataaaatgcttgaactatataatcaaaatagtactagatttataagaacgagagatgagtttcaaaaactattgcatgcagcaactattgcctggggaccaattggttacaagaaggtatttataaaggaaaataataatataataggatatttgataataagaacaataaaaaaagaagattctactgtaggagaagttgctgaaatagggttaaactctgtaaatgttgaaaatatattgaaatatgttgcaaataaatttggattagaatatttaaattataaagtacatgtgaaaaatcttaaagaccagttgaaatgtaatgggacagaatctttggactatcaacaaggaactatgaaaataataaattttactaagttgtgtgatagtttaagaagttattttagtcaatatgtagattttgaattactaaaatacatggaatttaaacaagttgaaaataaatatattattaaatacaaagaagaagaacttgtaatagaaaatttggataagcttaataaactgttttttgaaaaaaatgaggaacagtataatgaatttaaacatctaaaaaatatatatgaatttgctacaaaggcatttcctgtagattttccatggactgcaaatttaaattatcaatagttttagatgatattaaataaaattgattgatacctagagttagtccttgttaaataagagaaattattggatattgaaaaagcaattttgtaagtaattagaaaggatgagtattatatggacatacttgatgatatagcagaatgtatattaaatatgggtgtagataatatagagaatttagtaaaaattgctatagataaaaatattgatgtggaagatatttatgaatatggtttaaacaaaggtatgataggagctttagataagtttgagaataaggaatactatctttcagaagttatagtatgcacagatgcattaaataaaggtattaatcttttgaagggaactggaaaagtaaagaaaaaatcaaagggagtaattctgatgtctgtagtagaaggagatactcatgagataggaaaaaatattgtaaaagtaatggtagaagccactggatataaggttattgacttaggtgtaaatagaaaaagtgaagatataatagaagaagctataaaaaacaatgtagatataataggcttatcttcaatgatgacaactacaatggaaaatatgaaatcggttatagacgagcttaatatgattgagatagataaaagaccaaaagtaataattggtggaggacctgtaagtatggagtttgcagaagaaataggagcagatggatacagttcaaatgctccaaaagcagttaaattaataaacaaacttataggaggtgaagtttaaatgttttcagatatgactttacttcagtatataaatagtgaagatagaggtttttttctgcctgatatgggtacaaatggattgttcttaataaataaaaaggcatatgaagtatatgatagtgtagatttgcaattagaattagcaaagactatggacaagtattttgaatcagattttatatactcattctgtgatgggattacattttgtgaaactctgggtttagagacattaagaccagattatgattttccaagtgtattgacacatactataactgacagagataaattaagaaaattagatgttccagacccttatacgagtggacgtatgccactcaatatagagagcttatcagttatatcaaaaagtattaaaaaaccactatatgaatcgatacaaggtccatttacacttgcaggtcaattagctggagctactcaacttttaagatgtataataactgataaaaaatttgtagaagaattgttggaatttacaactgaattggtaagaagatatgctgtagctgcaaataaagcaggagcaaaatatatttcaatagcagagccaacgtcagtaaccctaagtaaagatagatttgatgaatatatagtaaaaaatttaaataaaatctacaatgaacttgattgttggaaaggtatgcatatatgtggagacaccagagaattattagataatatgctaagttgtaatatagatgcagtaagtttagaccaaattttagactatgaagaaattgctccaatgattcctagagatatagtgttgattggtaatttagacccaataaaacttcttggacgttctaagccagataagattagaagagagacactaaaattgttaaagaagatgagaggatatgataactttttatgtgattttggctgtaactgcttaaataccactccagtagaaaatttacaagcagctataaaagcaggaagaattaattataaagaattagataggattgatattgatgaattataatagtaataaaaataaatatcttttaaaggatataaatttagaggatatttttatagataagaatattgtgctaaagtttttggggtatggaaatagaaaagctccagatacaattagtgaaatcgttgaaagagaaataagaaatataaatgatattttagatatcaagatatatataagtgaagttgatattaataaaacacctaaagaatgtaaaaaagcatttgctgtactatatacaataggggataaaattgatattaagatgaatgactatatggaaaattgcaatatgatggcagggatagcattggataaaataggtatagtatgtttagattatattaatgagaaaataaaaatgtatttaaaaggaaagtatgatagtcttaaaatatcgcatgaaatatatccaggagataaagattttgaagtagagagacaaaaggatatttataactatgtaaaaaataaatataatagtatagaaatagaaatcaatgattatcatcaactatcccccataaaaagtgttgcaatgcttattttaatgggagatgaagaaaatttagaatcaagatgtagcaaatgtcctagaaaatgcttttaactagttttcaagactaagatttgttttgtgtatgaattgcaataatttttttggtcattttatgtataaactaaaaaaattattgcaaagtaatattctatttaatttgaacagacttacaaactatagtagtttctttaattcaataagtgtatttatttcataagttggtatatgattagtataatttatactgttattggaatttaaccaacaagtatctattcctgaatttattccacctaagacatcagaggttaagctattcccaatcattaaggcagaagatttatcatgacaattaaactttttgagagcgtatttaaatatttcaggatttggttttgatattttcaactcttcagatacaaccattccatcaatatatccttttatttttgaattttcaagtcttttcttttgaactgcagaaattccatttgttattataacaatagtatacttttttttaagatattgtaatatatcgattgcacctggaattaaaaatgtacattcacctaaaaaatttaagtacattttgctaagagtttcagaatcaacatccaaagatattttatttgcaaaaagttcaaatctaagtaatttaagttcattcaaagttataatatttttttcaaggtcgagccaaagcttatcacttatatttctatatgactctatataattctcaaaattaaattctaaatcaaactcagatagaagttttttaaaagcatgtgattcacttttcttaaaatcaaataaagtatcatctgcatcaaaaaatataaatttatatgtcttcatggtttttactcctttacaagatgactgcaaaaattactttactttcactatttgagtcattttgccatttatgctttgttcctaaaggaacttttacactatctcctttggacaaagtaaattcatcatcatccataaaaagtttaacttctccctccaaaacatatgcaatttcatctccattatgagtaatcctatcaatacaagaagaagtatttggagctaaatccataattgcaaattctaaattaccactagagtctggaattaaaatctcatatataacttctttgcttccaggtaaaataactttttttctattatcatgtcttactatcaagttttttttatctacttcagatacaaaaaatgtaaataaaggaacgtttagagaagaggctatagattttaatgaatttacagatggattagcaagacctcgttctatttggctcaataatgatggtgtaacatcagctagttttgctaaatctcgaatacttaagttttgtttttttcgaacttcagctattttttcccctaaatttaaatcattcatataaatatcctctctttttaatttaaaaaatattaacttaaaataatcaagtaaaatgattatgtagtatgaaattattataacatatagaattaggttttgaaaaaactatgttcaatataattaaataaattaaaatataattgacaaagtggatacagaatacttaaaatatatttaaataaaattaagcaaaagatagttaatttatgataggaggggacattatgcaaataacgacttttggagctatatttggtttattaatagcaattattttaattataaaaaaatttcaagctgtatatagtttaatgttaggagcatttattggaggattagttggaggagcaaatataacacaaactgtagattttatggcaaatggagctatgaatatatcaccatcaattcttagagctttggcatcaggtgtattagctggaagtttaataaaaacaggagcagtagataaaatatcagaacagattgtaaaaatatttggtgaaaagagggctttattttcgattgccatttcaactatggtacttgctggagtaggcgtaaatttggatgtatctataataactgtagcacctataggattatatataggtagaaaattaaattattctaaattgtcaatactattagctatgttgggagggggtaaagcaggtaatataatatcaccaaatccaaatactatagcagtagcagataatttttctgtcaatctctctagtgttatgatggcaaatataattccagcaattattggagttgttattacagttattttagcaagtatattaataaataaaggaaataaagtacaatcatatgaaattttagagcaaagagaagatttaccaagtttatttaaatcattatgtggtccaattatagctatatttctattgtttttaggaaatgtatctcctatagttatagacccaatgatagcccttccaataggaggaatcgtaactctaattgtcacaggaaacttgaacaattcaagagaatatttagcttttggattatctaagatgcaaggggtatgcatattattacttggaacagggactatcgcaggaattatacagatgtctgaattacaacagagtacaataggtgctttacaatttttaaatatgccacaatttttattggcaccagtttcgggtatacttatgtcattagcaacagcatcatcaacagctggtgctactatagcatcatctacttttcatgatgctataataaatggtgggctatcaccgatttcaggtgcatcaatagtaaatgctgggtctagtgtattcgagcaattaccacatggctcactatttcatactagttcaggtagtataaacatggatataggtgaaagatttaagttaattccatatgaagcattgataggaatagtaatgactataatttcaacatctattcaattagttttataataaatataaatatttaatgaaaaaagtaggattttgttattaaatattgaatttattatagtaaaaaagaagattggagttttaaagtgaataaaaaaaagattgttattatagggattatttattcatttttagtagtattttcacttacaaatatgtatgtaaatatggagtataatttaaatgtatttgaatatattaagaagtcacttccatttacagaagaagaaaaaaagtggttagaaaaacacaagaatttgatttacagctctgaccaaagttcacctcctttgagatataagggtaaggaagatggacagtataagggaattattgttgatttaataaattctctgtcaattcaaattggtagagatttttattttaaaccaaataattggtggaaagaatctttcgtaaattcaatagatgatagtataaagttttttgacttgattccatcaaaagaaagggcaaataaatttatatttactgacccaatatacactttgagtgcaaatatattgaaagataaaaagtcccaagatataaatagttacatggatttaaaggggaaaacagtagcaattccagaaggtgattattctataaattttttaaagcaaaaaattcaagatataaacattttattgactccagatataaagactggagtcaaccatttaatgtctggaaaagtagacgcagttgttggtgatgaaccagtattgcgatactatataaataattatggactttcaaataaatacagtgttttaagtaatcctatatatactaaaaaagcagttcttgctgtacctaaacaatatgaagagctggttagtattttaaataaaggcatttttaaacttcagaaaaatggagtgtataaagatttaaagaaaaaatggtattctacgtataatgaagttgatgatatattgtatgagcgaggaattgtgcctagtatttatctttttataggtataattttaatatcaatttatgttttttatagctatacatatttgttaaagatagaaatcaaaaggaaaacagaacaggtaatagaaaataaaaaaactttagaggcaacttttaatagtattacagatataataatgcttgtagatgaaaataacaatatagtagaatcgaacaaagtactatatgactttatgggtgaaatgagttataagatagcagatttgattagcatgataaaaggtgttattaaaaataccttctctgaaaatactaataaaactagtgaaatagaaatatacaataaaattttaaagataaacacttttcctgtagagtataaaaaaaataatactgagtatatagtagttcttattaaagatataactaatgaaaaaatagtagaggcgaaattacttagagaaaacaaaatgatatctataggacaattagcttctggggtagcacatgagataagaaatcctttgggtataataagaaataattgctatctattaaaagataacgttacaatggaagaagtgaatgattgtgttaaatcaatagaaagtaatgtagatagggcaagtaatataataaccaacttgttaaatttcgcaagaatatcagatgataatttagaacatataaatataagaaattttattgaaaatatagtgaaacttcaatataaaatgttacagttaaagaatgttgaaataaaaattgactgtgaacataatttagtatgctatataaatggagaatcgttaaaacatgtatttataaatttaatttctaattcaatagatgcaatacatcaagatggaaaaattattatatactgttatgaaaaaaatcattgtttatttatagattttaaagataatggtgaaggaataaaagaagatgccctaaaggacatatttaatcccttctatacaacaaaaccaattggtgagggaactggtttaggtttatatattacttataatgagattaaaaagaataatggagatataagtgttgaaagtaaattgggggttggaacttgttttcatataaaaattccattaaataaagaggtgactatataatgaaaatactattagttgatgatgagctagaatatggagtggtaatgaaaaaaattctacaaaagaagggctatcttgtagatatagcactaagtggtgaagaagctataaatataattaaaaaagataaaaattatgatttggttttatctgatgttatgatgaaaaatatggatggagtacagctattagatagaattaaatctattaatagagatatagaggttatattagttacaggatatggaagtattgaaaatgcagttgatgctatgaaaagaggagctttatcttattttataaaaagtaatcccattgaaaatttattagaagaagttgaaaaggtaaaggcaagtaaaatatctgtttctgtacaaaaaaataattttgaatttactttggaatctaaaaatagagattttaataatatcataaaaatagcaaaaaaagctgcttgtaaagatgttaatatattaatcttgggggaatctggtgtaggaaaagatatattagctagatatatacatagtataagtccaagaaagaatgagatatttgtacctgtaaattgttgttctttttcagaaaatctattggagtctgagttgtttggtcatgaaaaaggttcttttacaggagcagtagatagtagaaaaggtagatttgaactttcgaataaaggaactctatttttggatgaaataggagatatacctctaaatgttcaggtaaaacttttgaggacacttgaggacaaatctatagagaggataggaagtaataaatctattaaagttgactttaggttaatttgtgctatgaataaagaaccaaaagtggaaatatcaaatggaaatataagagaagattttttttatagaataagtacaataacaataactataccaccactaagaaagagaagagaagacttaactactcttatagaatttttcttaaataagtaccaaattgaacatgataaaaagatacactcgattgataaggaagtaaaggattttttattaaattacaattatccaggaaatataagagaattaaaaaatataataaatagacttgtagttttaagtgaagaaggcaatttatcaaaagacaatttaaatttaatatcaaataatgtatacatagatgataaaataagtattagacctttaagagaaataagaaaagagtttgaatgtgagtatattgaaaaagttttatctttgtgtggaaataatatttcaaatacagctaaaaaattggagattagtagaagacagttaaccaataaaatatcagagtataatattaagtgagaaaaaaacttctcattaagtgagaaaaaaatttctcaaactgtattaaaagataaagagaaaaaatctgtttatctttttttattataattttaaaaattaatatttacaataattattggtaaattcaatactggtgtaaattaaaaatgaaaatttctatgacattaatacatagaatatatattttaaataattggcatagaaaatgctttatatattaataaacgtaataaatatttttaattgcgattaaatatattaagggggattttcatatgaagctagagctagggaatatatttataaaaaatgttgaatttggagaaaagacagaagtaaaagatggagtactatatattagtagcgaagaaatagaaaagatagtattagaagatgaaaggattgtaagtgtaaatgttgaacttgcaagacctggcgaatcaataagaatagctccagttaaagatgtaatagagcctagagttaaaattggagatgaaagcaaaatatttcctggaattataaataaagtgaagactgtaggaagtggaagaacccatgtacttttaggagcttgtgttgtaacttgtggaaatatagttggatttcaagaaggcgtaattgatatgagtggtcctactgctaaatatacacctttttcaaaaacaaataatatatgtattgttataaaagcaaaggatggtatagatactcatgattatgaagaagcagctagaattgcaggattaaaaataggtgcatatgtaggtgaggcaggaagagaagttgagccagatgaagtcattgtatatgagacaaagccattattaaaacaagtaaaagaatatccagacctgccaacagtagcatatgttcacatgttacaatcacaaggacttttacatgacacttattactatggggtggatgctaaacagatagtgcctacatttatgtatccaactgaaataatggatggagctataatatctggaaactgtgtagcaccatgtgataaggttacaacattccatcatttaaataatccagttatacatgacttatataaaagacatggaaaagatttaaactttataggagttattttgactaatgagaacgtattcttagtcgataaagagagaagctctgatatggtagctaaattaatagaatttttaggagttgatggagttctagtgacagaagaaggttatgggaatccagatactgacctaatgatgaattgtagaaaatgtagtgaagttggagcaaatgtagttttgataacggatgaatttcctggaaaagatggcaagagtcaatctatagcagacgctactaaggaagcagatgcagttgtttcttgtggtcaaggaaatctagtggttcatttcccagcaatggaaaaaattataggaactttagattatgttgaaatgatgataggtgggtataaaggatgcttaaatgaagacggaagcatggatgcagagctacaaattataatagcatcaactatagcaaatggctataatcatttgacagcaagatattattaaataagtatttgaatataaagttctgttgatgtaatcgttggtctaattgatgtaataactataaagtgatttggaggattaagagatgagtaaaatcagagtggttcattatataaacaatttctttgctggtataggtggagaggaaaaagcagatattccgccagaaaaaagggctggtgtagtaggacctggaatagcatttcagagtcaatttaatgatgatgcagagataatctcaactgtaatttgtggagatacgtattttggtgaaaatattgagagtgcaactcaagaacttttaaaaatgataaaagaagaaagccccgatttatttattgcaggcccagcatttaatgcaggtagatatggagtagcttgtgggactatttgtaaggcagttgaagaagagttaaatattcctgtagttacaggaatgtataaagaaaatccaggtgtagatatgtttaaattagatttgcatatagtgtctacaggaaattcagcagcaagtcttagaaaggtagttccaataatgacgaaactaggtcttaaattggttagaggtgaggaaataggacctcctgaagaggaaggatatataatgagaggaataagaaaaaatttcttccatgaacttagagggtctgaaagagcaattgatatgttggttaaaaagatgaaaggggaaagctttgaaactgagtatccaatgcctgaatttgatagagttacacctatgaaacctgttaaagatttatctaagataaaacttgccctagtaacttctggagggatagttccaattgataatccagacaaaattgaatcttcaagtgctactaaatatggaatttacgatttaacagatatggattctatgtcaaataaagaatttacaactatacatggggggtatgacagagcatatgtccttgaaaatccaaatttagttgtaccattagatgtagttagagagcttgaaaaagaaggtgtaattggagaattagtagattattttataactactacaggaacaggaacgagtgttggcaattctaagagatttggagaagagttttctaagaaattgttagaagatgatgtagatgctgtaattttaacttctacatgaggtacttgtactcgttgtggagcaacgatggtaaaagagattgagagagctggtatagcagttgttcatatatgtacagtagtaccaatatcacttacaataggagctaatagaattgttccagcagtagggataccatatccacttggaaatcctatgttaggagaagaggaaagtaaaaaaattagaaagaatatagttttaaaagctttaaatgcactaacagaggatatagaagaacaaacagtatttgaataataaaaatataatatagaaataaaaaaagatatcataaaatagtttttgaaaattattttatgatatctttttgctatggatggaatgaagaaagcaattaagtaataaaaatatttatagtaaaacagccaattaaagtataaagaatgaaaaaaataaatagaagattatacataaacaaaaaaagagattttaaaatctctttttattatatattaattattttttaaatttatattttttgcatcagattttctaatagctaagtcaaaccctctaaatctaatcactatagggtcattaagaggagctatctttttcacttcaacttcagtgccatctattagtcctaaggctagaagtctcttcataagtttttcatttccagctatattgtctataattcccttttgtccaagttttaagttgtaaacagtcattattaacacctcctaatgaaaatcattatcaaactttatatttataatatataacaaaaagagtaaattgtcaatatataacaaaaaataaacatactaagttagtatgtttataaaaaatagtatacatgggatactaatagcatctagcaaaaaaccacttactaatggtacaaccaaaaaggcttttggagaatcaccatatttttgtgtcaaagaactcatatttgccaaagcgttcggagtagctcctattccatgtccaatcaaaccacttattatgatggcagaatcaaaatcttttccaagtactctaaagcaaataaatattgaaaataggattataaagattacttgaaaagttactattaagagaataggaggtaataatgtagataattcaaataaatctatattcataagtgataaagttaaaaaaattcccaatgaaagttcttttaaaaaatctataagtttaaaatttaattctaatatatttatcttatcatttaaatttctaaaaataacagctgaaaacatacaagttacaacagagggtaatagtatattaaacgttatatagaagcatctacttataatttctcctgtatttatacaaataaatatgagaagaacctgttccaaaaatacagatggtgttattgtttcggagaagttattattttttatcctattcttatttctaaaaaatttacttccaaatctctttagatttctattatatctaggaatcgacaagcctatatttgatgatggttttaatttatatttatttattagaaatttagctacaggacatcccaatataccacccataataagtcctattgttgcagcagataatccaaccccaactgctccttctataccgagattttctattgtaagtccaaatgcagcagaataaccatgaccaccttccatagatacatttccacacataagccctaaaagaggttcaagttttataatctttgatattgtaatagctaatatattttgacaaaatgccaatactccacacaaaatccaatatctaaataatacactaccacctttctttataagatttatgcttatttcaagtcctatagttgtaaaaaagaaggttataaaatttggcattaaatttccacttatagatatatctgctatattaaaatatttaaaaaataaatttagaaaacaaaataatagacctcctattactggtgcaggtatacagaaattatttaaaaagttaactttattcttcaataaattaccaattaaaaagaagaatatagatagtgtcaaggtttgcactatatcaaaacttaaggtaatcaaaataagtcctcctttgtaattcaaagttttaattatataacttaaattcttatgtattgaaattttattatcaaatgtatattaataaatgtatattaaaaagaatcagtatatataattagatagtcataaattaaattaaaatattttaatgagatgtgacttttttagaatgaaaaaccgtagtatattgatataatagaaataagacttaaaaatctgttgatagtattatttataagtacagtaggaggataaaatgtttgaaaatttacctaagatagatttacattgccacttagatggaagtgttagagtagaaaccatgcttgatatagctattaaagagaaaatagatttaccttcaaataatatggatgaaataaaaaaattagcaaaggtttcttttaattgtacttcactagatgaatatttagaaaaatttgatttacccttaaaagtaatgcaatctaaggaaaatttaaaaagaattacttttgaacttttggaagatgcaagtagagaaaatgtaaaatatattgaaattagatttgcaccattacttcacacccaaaaaggtatgagtgttaaaaatataattgagggtataattgaaggaattagagaagctgaaagtatttatgatataaaaggcaatttaatattaggttgtatgagaacaatgacctcaaaagaggcattattagtaattgaagaagggaaatcatttgtaaataaaggtgttgtagcagtagacttgtgtggtccagagaaagagggattttgtaaggaatataaagatgtttttaaattagcaagagaatatggatataaagttacaatacatgcaggagaagctgcaagtggagaaaatgtattggatgctataaatattttaaaggcggataggattggtcatggggtaaaaattaaagaccataaaaaggcgtataatttagttaaagataaaaaaatattgcttgaattatgtccaactagtaatgtacaaactaagacagtagattcttatgaggtacatccattttatactttttataaagataatttacatgtaagtataaatactgataatagaactgtatcagatataaatttaagttcagaactaaatgttatatttgatacttttaaactaggattagaagactataaaattatttatagaaatgcagtagaagctagttttgcagataaagaaactaaagagtatttgaatagtttaatttaatagataaaaatatttaaactttaaattaagctattaaattgacaaaaatacattgtattaggagaaaaaatgtgaaagattatgaagatgttgtttatattaaactagtcaaaaaagaacttgaagaatggaagaaaaatatattaaagaaaccttctatatttgacaaagcatcaaagggtatacagaataaatttaatggagtattgccagataaatatcatgaaataattacttcttctataaaagtaatgacaaaaaccgtactgtttggatataaatatgctacaaagccaccacttagaaatatgtcattagaagaaagagaaaaattagttttagaaaaagctaaaacttacaagaccacagcaatgattgaaggggcaggaacaggggcaggaggaatcctcttaggtttatctgattttcctttgcttttaggtattaaagtgaaatttttatatgatgtagcttcaatatatggatatgatgttaaagattatagagaaaggatttatatattaaacatattacagttggctttttctagtcaacagcatataaacaaaacttttaaattgatgaataactgggatgaatatgtaaatagtctaccagaagacatcaatgattttgattggagaacatttcaacaagagtatagagattatttagatttagctaagtttttacaactaatgcctggaataggagcatttgtaggattttatgtgaatggaaaattaattgataaattatgtgaaactgctgtgtctgcttatagattgaggattcgagagcttaagttataagagaaattataacataaaaaattagttatacaatatatctatatgtatctaattttgcattgataaaaacaattatggataaaaggtaaagcatgatagaatctaatgtagaggtttgtattttaatggaaaaatttagtttttattgcttaagatacaaattgaattacgaagagaagtaattgggaggaatattttcatgacaaatttgccaaaacaatttgatagcttcaatgaagctagacaaaagggatttataaatgcaaaggaacttaaggaaagtgggaaaaagatggttggagttttctgtacatttactccagttgaaattccaatggcagctggagcaactgtagtaggtgtatgcggtgttagtgaagagccaatacctgatgcagaaagggtgcttccaagaaatctttgtcctttaattaaatcaagctatggacatgcaataacagacacctgtccttatttctatttttctgatttgttgataggagaaaccacttgtgatggtaagaaaaaaatgtatgaagaacttgcaaaagttaagccaacatatgtaatgcatttgccaaatacttcaaaaggagaatttgcctataaactttggaaagatgaaatgataagattaaaagaagaggttgagaaatctttaggtgtaactataactgaagaagatataagaactgctataaaagataaaaatgaagaaagagaacttttaaaagagttttatgcacttggtaaattagaaccatctgcacttacaggccttgagttacataatgttttatatcaagcaggttttaaatttgaccgtgcagaacttaaacattctttaagaaaagttatagatgatatgaaagaaagatatgaaaaaggtgaatgtcctgttcaaaaagataagccaagaatattgataacaggttctcctattggtggaataagcgaaaaaatagttaaaactttagaagatgcaggggcatcagtcgttgcatatgaactttgtggagctattagatcaaacgatttattggttgatgaagaaatagaagatgtatatgatgctttaacacaaaaatatataaatataggttgttcttgtatgatgaataatgacaatcgtattgaattattagatagaataatagatgaatataatgtagatgctgtaatagatgtagttttacaagcatgtcatacatttaatatagaaagttatagaataagagaatttgttacaaaagaaaaaaataagccatttatgtctcttgaaactgattattcaaaatcagatactgaacaattaagaactagatttgaagcgtttgtagagatgttgtaggaataaataaaagtaggaggaactatgtttagtataggagttgactcagggtcagtggcaacaaagggtgtgctatttgatggtgaaaaaattattaagaaaataattataccaactggatggagccctaaaaatacatctaaacaggtctatgagttgctaagtagtgaaattgacaaaaaagatataaaaaaggtggtaggtacaggttatggaaggggagtaatggattttgctgataagaaagtaacagaaataacttgtcatactagaggtatttactttttaaacaagaacataaggactattttagatgtaggtggtcaagatagtaaagttataaatttagatagagatggaaatgtatttaactttataatgaatgataagtgtgctgcaggaactggtcgatttttagagattacttctaaccttttaggaagcgatattgaaagtatagatacattagctaaaggatatgaaccagttaatatatctagtatgtgtacagtttttgctgagtctgaaattgtaagtcttctagctcaaaacatttctactggagaggtagcagcagggatacttaaatctattgcaaataaatccacctcaatgttagcaagaggtgaggtaatagatgaagttgcatttactggagggcttgcaaaaagtaaagaactagtaaaaatgatagaagaaatactgggtaaaaaaatttttattgcagaagatactcaaataataggagctttaggagctgctgtaataggatttagataaaaacatataaaaagaaaatgaaaagctgaatttatcataaataagttcagttttttattttattttgtttatttataaaggaaaactttggtataattgatttaaatgattgtatatttgtaaatacttgatatttagtcatatataacattagaattttaaaaattagctcaaaataagggggagaaagcgtgaaaaaatttacttcaaaaaaagtagcaaggtttgttgcactgtttttaatatctattttagtaatgtcaacaattcctgtgtcagctgacaatagcaatacattgaatcagataaaaaaagcagaatacagtgatacttataaacaatatctaaatgatgctaaaaatggacgtacagaaaaatataatggaattataccaaatccatatcagttagaaggtactcaaattcaaagtaaaggaagaacagctccaacatcttatgaccctagaaaattaggtcttatgacatcagtaaaaaatcaagaggatttaggaatatgctgggattttgctgcaatggcaaccttggaaagtttcttgaagttaaataattatggagactacgatttatcagaagaacacttaagatggtgggcttcagatggtgaatatggatggtctgtaaatgatatggatggtgctttaaattatgaagctatgggatatttaacatcttggtcaggtcctaaattagaaaaagatatcccatacaatggtagagtatctaaagcacaaggagcaaaaaaaccaactaatatgaatacagcacctactgtttttaatgtgacagatgctgtgtgtgtaagtaatgacataaattctacaaaaaatgctatattacagtatggagcagtaacatctggttattatgaagatattaaatatcaaagtgatgaccaaaattcatattattgtccaacaaaaagttttaatacaaatcatgctatttcaattgtgggttgggatgataactattctaaagataattttaatgcaaatattagaccatcaaaaaatggtgcttggttaataaaaaatagctggggagattataattctgagggtggatatttctggatatcttatgaagacaagacacttatgtctgatatagataatttttcaatcaaaggtggtaaaaaaccaaatgatgatgagaagatgtatcaacatgactatgcaagtattgtacctttaatttcaaaaaagataacagctgcaaatgtatttgatttcaatagaggcgatgaaactctaaaatctgtaatgttcttaactgaaagtataggagctaagtatgaagtatcttatgctccagtagtaaatggtatacctcaagaaaacaatatgaaaaaattaaaagaaggtactgcccaatattcaggatacataacagttccaattgattcttttaatataccagaaggaaagggtgcaattgtagtcagtatagaggggaaaaatggagagtcaactataggttctgagtcaaatgtaccaggatatgatacatttaaagcaaaagctaatttaggtgaaagttatatcatagataatactggaaaattctttgatataaatagagatagtaacttctatccgtgtaattttactataaaagctgttacagaaaagtcttctggtgagagtatcccgaatgagtctttaattggtagtgatagatatgaaactgctatcaaagttagtcaaaatggtttcaattcttcagaaaatgtagttttagtaaatggcagttcaatagtagatgcattggcagcaactccttttacatctgctataaattcaccaatattattgacacaaaaagaagctttaaattcaaaaactaaagctgagatacagagattaggtgctaagaaagtatacctaataggcggagaaaattctataagtaaagaaattgaacaacaattaaaaagcttaaatatatcgatagagagaatatcaggaagtgatagatacaagacaagtttattattagctcaaaagttaaatggtataaaaaatgtatctcaaatagcagttgtaaatggagtgaaaggattagctgatgcaattagtgtaggtgctgctgcagcagaaaataacataccaatcatacttgcaaatgaaaagagcgaattgcaaggagctgatgaatttctaaattcattaaatatagagaaatcttatattattggaggaacagcatccctatcaaacaatctagaaagtaagttaaaaaatccaactagattatctggtagtagtagagacgaaactaattcaaagataatagataatttttataaaaaagatactttaaaaaatgcatttgtagttaaaaatggaatcaagaatcaaaatgatttaatagatggattggcagttggtcctttaggagcaaaaactgggtcaccagtaattttagttggtgataaattagctgatagccaaaaagaagttcttaaaaataagactttagaaaaagtaactcaagttggtggaggagcaaataaaaatgcatttaaagagttagtaaaattaaaaagtgctaaatagagtacttaagtattaacatatattagtgtgtattagtaacttatcttaataaaagctgaaaataattactttaaattattgataaataagataatcaatgattgtaaagttttgttttcagctttaaatttatgtagtataagtttaaaaacataaaaaagggttactatatatagaaatatagaaaatcttatattttatatataaataacccatatttaattaactttttatagtgttctaatagatattattgaacttaatggtaaatataatgtgtaagtttcatttaaagttggattagattcatctatatatcttgagcaaagtgtaattgataagctatctgcttctataatttcaccatatagaggacaactgctaaagtaagaatgtacttcaacatatttatttaagttttcttgaacataatcgtaaaaacggttttttgtagtagtagccataaaatcaactcctttattttttattaaagttgaaacttttaaaaagataaatatgagtacttctattagaaactaagttaaaaaataagcaaatagatatgaaaattagaataatatattatttatatcttaattataacactagataataaaaaatgctatataaaattcagaattttcgaaagtttttaagcttatttttaaatatactaataatactattgacattagatagaaaaagtattatattgactatataaattattttagtcaaactggaggaaaaagatgcctaaatcgtattctgataaagaaagagagtatataataaaaagacttaaagaagaagcaagattgtgtatggagcaatatggtattagaaaaactactgttgatgagcttgtaaaacgggtaaaaataccaaaaggaactttttatctattttttcaatcaaaagaattgctcttttttgaggtattgagagatatacatgactctatacaaaaagaaatcttatatgagataaatagagtagatgaaagtattacatgtgaacaattgacagatatatttatgaaattctataggatggttgatagtacttcaattttaaatctcatgataaatggagaatttgagatattggtgagaaagttaccagattctataattgaagaacactttagacatgatgactttgaaattggagagattatatcttgcataccaaatgcaaaaaataaagacatagaaagctttagtggagcatttagagtagtttttcttaccatgctatataagcgcgaggttggaagtaattgttttgaagatgctttaagattaatgataaacggattagttatacaacttatggaatagaatttaaattttgtttgctaataacttttattaaaaattattaacaaacaaaaaaattatattttattgaccatatagtcaaaatagtcaaaaatttgaaagggtgatattgaatgattaaagttgatgatttatcatttagttatacagatagaaattttttacaaaatattaactttgaagtagaaaaaggggaaatactaggatttttaggaccatcaggtgcaggaaaatctacattacaaaagattctaattggaatgataactaattatggaggaagtgtcattgtaaatggagtagagagtaaaagacactcaaataaattttatgaaaatataggagttgattttgaatttcctagtttatatgaaaagttgactgcaatagaaaatttaaaatattttgggtctctatattctaaaaaactactatctattgatgagttattaaaatcagtaggactagaaaatgaagcaaataaaagggtatctgagtattcaaaaggtatgaaatctcgattaaattttataaaagctttattacataatccagatattttatttttagatgaaccaacaagtggtcttgacccgtcaaatagcaaggttatgaaagatataattttatcagaaaaatctaaaggtaaaactattattttaacaactcataacatgttagatgcaacggagctttgtgacagagtagcgttcattgtaaatggtaaaatatctgctttagatacaccacataatcttattatgtcaaaaggagctattaaagttagatatacttactttgataatggagaaaaaacttctgaatgttttctgaacaatactgctaatgataaaaatttgaatatgcttattaagaaaaataaacttttatcaatacatagtagtgaaccaacattaaatgatatttttattgagataacagggaggaatttacaatgaggctaaaaaatcttattttaggagatataaagtttcaatttaagtatggtttttattttttatatctttttttaagtattatatatatttgtattatcaatgtatttccaacttttatgagagaaaaaatagctataattatgatttattctgacccagcagcaatgggattgttttttatgggagctattgtacttcttgagaaaagtcaaagggttttaaattccttagctgtatctccagtaaaagtatctgagtatattttatcaaaggtaatttcattaggagtaatatctagtattgtagctatgtttattgctattacattaaatttagataatattataatatcaactataggtacctttttttcttctattatattttctttgcttggattgatacttgcaagtaaagcatctagtttgaatcagtttattgttttaagtattcctattgagattatatgctttattccaccaatactcaatgtacttcttgacacaaaatcatatgcaaatttgtacccttttaatatatgtatttctcttattagtggagataaaaattttataatgattaatattttaatatcaattataataataatttattttataacttattattttatttgtagcagttggaaaaaggtaggtggagtaaaactatgataaagattataaatgcgtttaaacaagagtttgaacaaattaagagagatgctatgctttttatagtatgtgtttctccaatattatgtggagtatttataaaatttggaataccattaatacagaatatatcacttaacaagttttattatcaattaaatttagagccgtatttcttgatgtttgatttacttttagcttttattacaccttttatgttcttttttgcttctacaatggtcatattgggagaaattgatgacagcatttcaagatatttaatagtaactccgcttggtaaaactggttatcttatttcacgatttggaataccaggtaccttagcatttattattactatgattctacttatctttttttctctaactaaaatttctttcttgttaaacttatcaatttctttattagttttattacaaggagttattatatcaatactagtgatttctttatcatcaaataaactagaaggaatggtaattacgaaattctcaggtgtttttatgatgggtattttagcaccattttttattttaaataaagcacaatatattctgttcttcttaccaactttttggatatcgaaggcatttaaggaagataattatatctatatgtttatttcaattgttatatcattaatatggattttattattatttaaaaagtttagtaaaaaaatagttaaataagaaaatttaatatataaatgtaaggttgacttgacagtaatgttgaaaaatgttacatttaagatgtaaagttaaccttacatgaatggagcaaatatgaaaaataaaataaagatattaagagaaaaattaggattgacacaagaacaactaggaagattagttggaacatctagacaggctataaatgctatagaaactggtaaaaatgaaccttcaatatggttggcatatgatatttcaagaatttttaatgaaccaattgaaagtgtatttttatttgaagaaagtgaaagaaaatcaagagcacagataagtaggggagaatattatggctataagaaagataagaacatttgatgatgaaattttaagaaaaaagagtaagtatgtagaaaacgtagataataagataagagaaatattaaatgacatggcagagaccatgtacaatactccaaatggaggaggattagctgcatgccaagtaggagtattaaagcgattagttgttatagatttaggagaaggacttattaagcttgttaatcctgaaattattaaacaagaaggggaacaaattgttgttgaaggatgtttaagttttccagaagtatggggtaaattaaaaagaccaaaaaaagttacagtgcaagctctaaacgaatacggtgagaaaatagaaattaaaggttcaggttttatggcaaaatgtctttgtcatgagatagaccatttaaatggtatagtttttacagataaaattattgaacatgtaaaattgtaagatagattggttattgaatttataaaatattttatagtaaggagttaaattatgagattatggcataaggatttaattgatgtattacctaaaaatcaattagtaagtcaatggagagagctacttgctataaaaggttctatagataaaaaaggtactccaaaccatctattagtgaataaagtattgaattatagtatagatgaatttaaattttatacaaaaattgtacatgatgaaatgttaaaaagaaattataaacctaatgaacttaaatatacaagtatattaaaatggaaaaatagaaattttgcaaatgatatatctaatgaacatagtttaaatttagaaaatttatatgatgattggcataataaaatgtatttaaagcaatgcttatataatttagaagaaaaagcaacatgtggaggaataccaataaatgaatggaatatattactttgtaaatatagtaaagattatgaattgtggtctggaaatatcatgttttaattactatagattaacattatagtattattgtatataaagaggtgattatttgtataataaaataaaatatattccaataaattgtgaaatagcttgtaataaattaaaaaggagtatgccatataaatgggatttaaatatttatcgtggatgtgagcatggatgtaaatattgttatgctatttactctcataagtacattaactccaataattattttgaagagatttatgtaaaaacaaatatagtagaaaaacttgagagacaacttaaaagcagtaaatggaagaaagaagtaatcaatataggaggagttacagatagttatcaaccaatagaagctgactataaaattatgccagaaatattaaacctgctgataaaatacaagacaccagctattatttctacaaagtcagatttaattttaagagattacgatttaattgataagctatctaggattacatatatcaatgtagcatctacaattaccacagtaaatgaagatacacaaaggcttattgagccaaatggtgtggattcaatgagacgatttaaaatgttaaaagaatttagaaaaactaacgcatcagttggtctacatattatgccaattataccatatattacagatgattttgataatataaattcgctatttagacatgcaaaagaatgtaatgtacattatgttttacctgggactttatacttaaggggtataactagaggtgttttttttgactttgttaaaaaagagtttcctgaattatttgataaattatcaatactatatagtgcaggttcacttaatagggagtataaaaatcaattgtataaaatggttaatgaacttagatataaatattctctatcaagcagttactctaaaataatgaaggaaaagttaaaaaactcaggagatggacagatatctttttttgattagttttatataaaaaatttttttttactatgatgattaaaatttattaaaattaaaatttattgacaaatataaaatttaaatatataattgattcataaaataaaaatatgaaaggatgatgttgttcggtgatatttgatatcataaaatcgttgatataagtattgctggaaaagagtgaataaaatcaaatttaataagcaaacaaagtaaagctatagttttattgttgtgcttaaaaatatttggttctattttactcttatttaaactcatctttttgaagttaaaccacagagtaaactctgtggtttttttattttaaaaataaattttaaggagtggtatgttttgttaaacaaattatgtatgtatttagaaagaccagagctttataaacaaagtgaaattaatttttgggatgatgagtatatttcaaaacaattattaaaagcacatttagacactaattttgaaggagcaagtagaaattttaactttatcgaggattctgtaaattggatagttacagttgcaaatccagttaattatcctaatttacttgatttaggttgtggtccaggtttatatgcagagaaatttgcacaaaaaggttataaggtaactggaattgatttctcaaaacgttctattaactatgcacaaaatagaaataaggagactaatttaaacataaattacttgtttcaaagttatttaaatatgaactataatgatgaatttgatttggctactttaatttattgtgattatggagctttgtcaactgaaaatagaaggttattaatggaaaaaatttatgatagtttaaaacctggaggaaaattaatattagatgtatttacaataaataaatacaataattttgaggaaattaaatattgggaaataaatgaagatggaggattttggagtaatgaaaaatatatgtgtctacaagataattgtaaatacaatgattataatacattagaacaaactcttgtaataaccgaaaaagatgaaaatgtattttatgtttggaatcactatttttcaaaagaaagtttcttattagaagttgaaaatattggatttaagtctgttgagttttttagtaatgttaagggtgaagcatattctgacgatagtatgactatgggattagttttacaaaaataataatttttttaaaatgaataaataaaaacttgaaacctttaacaataaaataacataagaaaagcttacatattgaaaaatggaaacttttatgttatttttagtacattacaaattttcttatataaaaatcaatacttgaattattatttttatgtgaaatttatctatagtatatttttataaacaagtaatgttattaaaattaagtatatagttaaaagtgtatagcaaaaaggctgttatattaatgttagaggttcagggaaaatatataaagcaaagatatttacagataatgtagattgcacagctataagttagataatagaattatgtaatcaagaatttacaacaaagtataagataaggataatgctaaattgccatacaggtgctagatgtgtaaatggatttaattaatactattgataaagtgcaacaagcacataaaccaattgatgagattattaaaactataagagatatagttgacataattaaaatattggaacctatttataattttaaatcaaatcaataatgattaagattaaaataatattaaggtatcaatgttataagagtacaatataaggagtactatatagtactccttacttatacatattaggcaataggaaatcttttcatagttaaattttcaaatattttttagggaactttataattgagaattaagggtatagtatgtgatgaacttactaaatttataattaggttatataatggaataatcatcaatagttttactttagggaaaatatatgcttaaggaagtatagcttactaatattattaaaatgtatatttaaaatgataaaaaaagaattagacaagtatttagtaaattgattatgtaaaattctatcaagcaggaaccctatgactttagtcatgggaggttcagtaggtaacttgttgaattaagtttatattatttaaataaactacttaatttagataatataaaaagtcagaattttaagaatagagctatataatcttagctattaggagaagtactatgataggaatatattttagtggaacaggaaattcaagatactgtgtagaaaaatttttacaagaatatgatataacagcaaattcttattctattgaagataatgaacttttacagcacatcaataatcatgagaatattatttttagttatcctgtgcaatatagtaatgtgccaaaaatattgaaagattttataataaatcattcaactttgtggaatggtaaacgtgtttttattattgcaactatggctctatttagtggagatggctctggtgtgttagctagaatattaaaaaaatacggtgctataactgttggtggattacatgtgaagatgccagatagtataggagatgaaaaggtattaaaacattctttagagtataataaaaagcttgtaataaaagcagaaaagaaagtaactaaagctgctaaaaaactgaaacatgggtcaccaccaaaagaagggttaggttttttgagtcatattgtagggttatttggacaacgattgtattttatcaataaaacaaatatgtatacagataaactaaaaattaatactgaggaatgtattgtatgtggtaaatgtgttaatttatgtccaatgaagaatctagtaattaaaaattgtatgattgttgcaaatgggcaatgtacaatgtgttatcgttgtgtaaataattgtgcaaaaaaagcaattacattgttaggtaaaaaagttgttgagcagagcaatattaaaaaatatatgtaagaaatttaaagttttattgaatgtaaattgatgtatattttatgttggaaagagaggtcaaataatggaatactacatagttgattcatttgcaactaaactatttaaaggaaatcctgctggagtttgtgttcttgacagaataatacctttagagttaatgcagaaaatagcagaagaaaacaatttaccagaaacagcatttgtagttaaaggtaaaggaaattatgaattacgatggtttactcctaaagcagaaattgatttatgtggtcatgcaactttagcagcagcttatgtaatatcaaattttattgatgttaatgtaaaaaggatagatttctttactcaaagtggaaagcttgaagttacacgaaatggaaatctatatgaaatgatatttccagaaataatgcctattgaaatagagttatcaccataacaagctaatttgataggctgtgtaccaagtgctgtctattcttcaagagatttaatcttattgctaaacagtgaacaagaagttataaattataaacctaattacgcacaattgcgtaaattgacagactggttaggtataataatcacaccacaaggaagtaatacagattttgtatcaagatatttttgtccagaattagattcagaagaccctgttactggttcatcacattgtaattttattccatactggtctgaaaagttgggaaaacacaaaatggtagctgctcaactttctaatcgtggtggtataattcagtgtgaagtgttgaaggataatactgtaaaaatttctggtgaagcagtcttgtttatgcagggaacaataaagattgatatttaaataagtataataactaatttattatgaaaaataattaattttcttagtgttaacaataataaagtagagttaaaaagcttgatttcacttaaatcaatatgatagatgttgatactaagattgacaagcatgattaaaaaagataatatttaatctataaagataaaaacacagtctggttggtagtccagacgcagcaatagctgtcagtaacctgcctccttggttgtccgttctttagaaagtaatttaaggaggaactagcgatggacaaaattagtggaaaattaacagtcttatttgaagaaccattttgggtaggtatatttgaaagacaagatggtaaaaaatatgaagcatgtagggtagtttttggagcagaacctaaagaagtagaagtgtatgaatttatacttgaaagatttttctcattagattttggtagcattaaattagaaaaaaatgtgaccaaagacaacattggatacaaaagaatgcagagaaaagtaaaaaaggaacaagaaaaagaaactatagggactaaggctcaaaatgctcttaagcttcaatatgaagaaagaaaacaggatagaaaaaacctagctaaaaatagaaaagaagaagaaaaagaaagaatatttaatttgaaacaagaaaagagaaaagctaaacataagggtcattaattttaattaaatatctttttaataattgctagaaaaaggtgtataaagtttttaattttatacaccttaatttattgaaaagaataaggttttatatttcaattactttaaaatataaaaatatactaataaaaattgtaaaaatagtataaatggtataccaaatgtaaatttaatgtgtttagttttatgtctaaaagaatacattccaatcatagaacctatactacctccaattactgctatagacataagagtagcttcttttattctccattcgtttctaattgctcttttcttatctatgtacattgaaaagaaagcaatagaattaatcactataaaatatattagaataaaatttttcacagtcttgcctccataaaaatatattatacattataaaacaagatatttgttttggaaagttaaatttgtaattagtacatataaaatatctgataagaataaatataatattaattggaaaatttaaaaaaattaaacaattagcaaatagggggtatatttataagacacaaagtgataaaatctatttagaaaataatgtaaaataacaggaggataaagcaaaatgaaatttatagtagaaaaagaagtttttgataaattagaaaatgtatgctttggtgtagtagttgcaaaaggaatagataatactaaagaaatagaaagaataagcaaccttttagatataagtatagatagagtagaagattacttcaaagataaaaaagtaaaggaatcagaagaaattataccatatagagaggcatttagaagtctaggcatgaacccaaataaatttatgagttcgatagaagcaatgacaacaagggttgctaagaataagaaacttcctcatataaatcctattgtagatttaggaaactctatttctttaaaatatttacttccaatgggtgctcatgatatggattttagaaatgatgatgtatatgttagattttctaaaaaaggggataaatttgtaccatttggagaaactgatgttgaattaatggaagaaggagaattaatttattcagttggagacatggtaaaaactagaagatggatatggagacaaggagaggaaggaaaaattactaatagctcaaaaaatatattttttcctatagatggttttactgatgctaatttagataaggtaatgagtgcaagagaagaattagcaaaattgttaaaggaaatatttaattgtgaaatcaaagtaggttttgtagataaagataatcctgaaatggaaatataataagttgttgaatacttgttaagatattatatttacttaatgatgttaaaaaggtattaaaaaagaaaggtcgtagtaaatttgaaaaaaactataataaagaatgtaaatccaatgattgaaaataagtttataggactttttgaaatagagtataaaaacaaattagatgaagataaggtttggatggtagcatcaagaaaaagtagtgagcaattaaaaaatatttatttgaagaatgaagaagatagtgtagatgcagttgtaatagttgggcttcataaaagtagtaaaaaattaattttaataagacaatttagagtacctattaatggatatatatacgagttaccagcaggtcttgttgatgaaggagagtctatagatatttctgttgaaagagaacttagagaagaaacaggacttactcttttagaaattaaaaaaaataaaagtattgataaagtttatttatctcctggaatgagtgatgaatctgttgcctttgtttattgtatatgtgatggtgatataacagatgaatttttagaaccagatgaagagattgaagcgcttttaatttcgcaagaagatgcaaaagagattttacaaagtaatcataagatagacacaaaagcatttttgattttacaaatgtttgtgagtttaggagctaaattatttgaatagatatatagaaaagaggttatatagaagagtaaaataataaagtttattttacttgtataaattataatctctttttttatacaataaagtataattttgtgtatttttaaataagttacttgactcttaaattttcataatatgttataaaccaatttaagatactacaataattaaaattccaaaattatttagcatatttgcaattaaaatgagaaaaggtaaaggctgaatgattgaaaaatttgatgtaaaatagtagattagtttaatattatagtttgtagggttaaaaattagaaattgtaaaggagataaattctatgaaaaaattagttattattttaattagtatcattagtgtggttagcttgacagcttgtaaaaaaagcaatgaaagtaaatataataatttaaacaacaaagaatcaggacaaacaaccattgaaatggacttagataaaaattatgatacttcagacccatttgttaatgcacgtttgttttgtgtgtctaatgatatagatgttttagacacagagatttcttttaaaatggatggagatagtggtattgtggaaataaaggacaataaaacagatgaaactttatggagtaatacatggcatggaagcgttgataatgatacattcgcaatttctctttctaatatacaaaaagagaaagagtatgctatatgctttaccggaattaaaataaatcatgcagttgtaaaggttacttttgaaagcaatttagttaaggagaaagaaaaaccctcaaaataaattccagcttgtctataacttgatattcagtacataaaagcagttgatatttatgattgactgctttttcctatcaaaaaggataggttgtgcatttttacttgaaatagtttatgcacatcaaaagttggtgagcatgatattggaaatggtaagcatgaaatcttgataacacaaggaaataaatttaagttttcaattaagtatatttccataatttagttaacaataagctaattattatttatattttgatatataaataataattgtggcaaattttaaaaaatcatatattttttgaactaaataaaaatttgtttttattattttaaattagaggagattcttgaagatatattatttttaaaaataagtatagtttaaaaattcaaaaaaaagatggcaaaatatgtcccaagggacattgagtaaaataaatgatttcagcttatttacactaaaaagtacatactaaatgaggggtgaaataaagaaaaatgatatactaattgtcttttgataataaaaaaacatggaatttgattatttaatcaagaaaaagtattgaacaaatgatttatttagtgtacaataatcatgtaaaaacatagtaatggagggagacatttcataatgaaaattaaggtaggaatgaacggatttggaagaataggaagagctgtattaagaatagctcaagaagaattaggagataatatagaaattgtagccataaatgcaagagcaacaacagaatctttggcacatttatttacatatgattcatgctatggaacttttagaggtgaagtagaggcaaaggatgaagacactctagtagtaaactctaaagagataaaaatattaagatatagtgacccagaagaattaccatggaaagaactgggggttgatatagtaatagaatcaacaggattatttacacaaagagaaaaggcagaaaaacatattaaagcaggagcaaaaaaagtaattataacagctccaggaaaaaatgaagatataactatagttatcggagttaatgagaaagaatatgataatcaaaagcacaatataatttcaaatgcatcttgtactacaaattgtctagctccttttgctaaagtattggacgaaaaatttggtatagtaaaagggttaatgactacagtacattcatatactaacgatcaaagaatattagataaaagccataaagatttgagaagagcaagagcagcggctgaatctataatacctaccactacaggagcagcaaaagctgtgtcaagagtactaccacaattagaaggaaaattaaatggtttttcacttagagtaccaacaccaacagtttcacttgttgatttagtgtgcgaacttaaagaaaacgttacatctgagcaagttaactctgtgttaaaagatgctgctgaaggagaattaaaaggtgttttaggatattgtgacaagccacttgtttctatagattataaaggagattcaagatcatctattatagacgctctatccacaatggttatagaagacaatatggttaaggtagtttcttggtatgataatgaatggggatattcttcaagaactgttgacttagtaaaatatgtagctgaaaaattaaaataatatatatttcttaaagcaaattttaaaaaaattttttgaaaaaattatataaaactaaaaaaaaagattatgaaaaatattgaaggaaaaattttttcataatcttttttctttcatgcaaaaagatacaagttacaacttatatttgcatattaggtcgttagagaagtatatatatatttagtaaggaatcatactttttataaaatgaaagataagatgtcgaaaacttgcataaatctgaaaaatttttattattaaaatactgattttcattttaaaaatgataaaaaaatgacaaataaagttgcaaatagtaatacttataagtataattaaaaaagagaaaaggttttgttaaactttataacaaaaaaagaagggatgattcaaaatggagaagttaacagacaggagacaggttaaggcagtaagcatggaaaccttcattttcctaatattactagtagttggttttgggtatgttggtagtattatgggagcaggaatgatgttcaaagtaataatgagtacagcacatgctttactattggagacagttttcttaattatggctatggcagttcttgcaggcgcattaagcgcactactttcagagtttggagtaatagcgttaattaataaaattttcgctgtatttatgaagcctttatatggactacctggtgctagtatagcaggagctataacaacttatttatcagataatccagctattataccttttgctaaagataaaacattcacacagtattttaaacaataccaagttccagcattatgtaacttaggaacagcctttggtatgggacttatcttaacaacatttatgatttctcaaggtacagaatatgtacttccagcattaattggtaatttaggtgcaattataggtagcgtcataagtgttagaataatgttgacatttactaagaagttttataaatacaatccggaagaagataaagcaacaggaacattagagaaaaaggatgaatttagagaaatcagagaaggaaatgtatttcaaagagctttagatgcaattcttgaaggtggtaaaatgggggtagatatgggaatggctataattcctggagtcctagtagtatgtacattggtgatgttattaacttttggaccatctacagaccctgttacaggtcaagaagtttatacaggagctgcatatgaaggaataaaattacttccagttattggagataaacttggatttatattagaaccattatttggatttacatcaccagaggcaatagcattccctataacttcattgggagctgttggtgcagcaatgtctctagttccagagtttataaagtcaggagctataactcctaatgatatagcagtatttacagctatgggtatgtgttggagtggatatttaagtacacatattggtatgatggatgcattaaatgctagacagttggcaggtaaagctattctttctcatacaataggtggtttatgtgcaggagcagcagctcactttatatttacactcgtaggataaacgtaatcagctaagataaaaaataatatacaaaaaaatggttgttgatatgtaataagaatttacatatcaacaaccatttttttctgactaaagataatttataatacataaacattaagtggatattagacttaagttatatttatgtaaaaagtaacaaaaatctgtagaaatttatgacaaaatttagtacactaactatatgttcttatttaaaatttaaggttagaattaggaattacctagtagagtaagctttgattaataaaagaatcataaaataaaaatattagtcataaagattataaataacttacttaaaataaagccatagaacttacaaaaattaaaaaagcatataaatatggaggggtacaatggatgaattatttcatataggaattgatgtaggttctacaacggtgaaggttgtggtacttaataatagtaataatatagttcataaagaatatagaagacattattctgatgtaaaaaaatcagttaaagaagtactaaatggtatatatgaaaaattgggagatataaatactaccattataataactggttcaggtggaattggaatatcaaaaaaattaggtgtaaaatttgttcaggaagttatatctagtacaaaatcaatagagtattttcatcctgaaactgatgttgtcatagaacttgggggtgaagatgcaaagataacatatctaagtggaggaatagaccaaagaatgaatggaatatgtgcaggtggcactggagcattcatagaccaaatggcatcacttttaaagacagatgccagtggattaaatgaacttgctaaagggtataatgttatatatcctatagcttcaagatgtggtgtttttgctaaaacagatattcaacctcttataaatgatggagccaatcagactgatatagcaatgagtattttcaatgcagttgtcgtacaaactgtgagtgtcctttcttgtggaagaaaaatagaaggaaatgttgcgtttttgggtggtccattgtactttttatctgaacttagagaagcatttaaaagagtattggatttaaaagatgaaaacataatcttcccagaaaatgcacaactttatattgctattggagcaggattattatcagtagatgaagataatatacaactaaaatctctaatagaaaaattggatagtataaagaatattgaagatggagaagtaaatttattagaacctttatttaaagataaaaatgagtatgaagaattttcaagaagacatgaaaaagaaaaaataagttatgtggacataaattcaataaaaagcaattgttatttaggaattgatgcaggctcaactacaactaaagcagcacttattgatgaggatggaagacttgtatattcttattataatagcaatgaaggaaatccattaaaaacaaccattaaagttataaatgaagtatatgatatattaccaaaaaatattaaaatattgagttcaactgtaactggatatggagaaggtcttattaaaaaagctcttaaaatcgataacggagagatagagactatagcacattacaaagctgctaaatttttcaataaagatgtagattttatacttgatattggtggtcaagatatgaagtgcctaaaaataaaagatggagtaattgataatataatattaaatgaggcttgttcatcaggttgtggctcatttttagagacatttgcaagttctttatctatgacaatagaagaatttgcacatgaaggtatttattctcaaaatcctgtagatttaggttcaagatgtactgtatttatgaattctagagtaaaacaagctcaaaaagaaggtgcaagtgttggagatatatcagcagggctatcttattcagtaataaaaaatgctttatttaaagtaataaagattagagatttaaatgagattggtaataatattgttgtacaaggtggaaccttttataatgatttggtgcttagaagctttgaaaaactaattggaaaaaatgtaattagacctaatatttcaggaattatgggagcttttggttcagcacttatagctaaagaaaaatatgaaagtggatacaaaacatccttgttatctaaggaagagttgaataatatcaagctagaagcaagtgtaactagatgtaaaggttgttcaaatcattgtcttcttacaataaataaattttctgataatgaaatttttatttcaggtaatagatgtgagaagggtgaagctatttatggtgataaaaaaataggattagaaaagaaaaaaccaataaatttatttaagtacaaatacaatagaatttttagatacaaaccattggaaaaagaagaagcaaaaaatggggaaatagggataccaagagtattaaatatgtatgaagattatccattttggtttacttttttcaatgctatgggctttagagttgtactttcagataggtcatcaaaacagttatatgaaactggtataactagtattgcatctgaaacagtttgttatccaggaaaattagttcatggacatatagaaaatttaattgcaaaaggtataaaaaatatattttatccaagtgtaacaaatgaaaataaagaggattcaaatgcagataattattataattgtcctgttgtaatatcatattctgaagtaataaaaaacaatgtagagaatataagaaataagaacataaattatataaatccatttataagtctaaatgataaggaaaaattgaagaaaagactatatgatgaattatcaagacatttttctgatataaaaataactaaagaagaagttaatcatgcagttgataaagctactgatgaacagaatttatttaaaatggagatacaagcagcaggtgaaagagcacttaaagaaataaaagaaagaaatatgaaggggattgtgttatgtggaagaccatatcatatagacccagaaataaatcatggaatgccagagcttataaattcattagatatggcagtgcttactgaagactctatatgtcatttagccaatgtacaaagaccacttagagttgtagaccaatgggtatatcattcaagattgtataaagcagctagttttgtaagagataaaaactatttggaacttgttcaacttaattcatttggctgtggattagatgcagtaactacagaccaggttcaagaaatacttaatgaaaaatcgaagatatatactattataaagattgacgaaggcaacaatttaggagcagctaagataaggatgaggtccttaaaagcagctatgtttgagagagaaagcaaaaatatagatgtaaaaaatataaaggtaaacaggatacagtatgctaaaaataatcagataacgaacaaacatactatattagcaccacaaatgtctccaatacatttccaattccttgaaaaagctgttaacttaagtggttataatatagaaattctaaaagatactgatagtagtgtaattgaagaagggttaagatatgtaaataatgatgcatgttatccagctataatagttgtaggtcagctaataacagcattaaaatctggcaaatatgatttaaataatacttctgttactataactcagactggtggaggttgtagagctacaaattatattggattcttaagaaaggctatatatgatgctggatttaaagatgttcctgtcattgcacttagtgtaaatggaatagaagatagtggtataatggataatatatcactaaaattaatcaatagactctttatgtctgttgtttatggtgatttgctgatgaaagtactatatagagtaagaccatatgaaaaagttactggaagtgcaaatgctctatatgaaaaatgggttgatatatgcaaatcttctcttgttaaagcaaaaatttctgtatttactagaaatataaaagatatagtaaaagaatttgataatttagagatactagatatcaaaaaaccaaaagtaggtttggttggagaaatattggtgaaattccatccaattgcaaataataatttagtagatatattagagcgagaaggtgctgaagcagtcgtgccagaccttacaaatttcttcttaagttgtgcctttaatactatatacaaacacactcatttagaaggaagtagaaagagtagaatgataggagaagcatttatatacataactggaatatatcaaagagtatataaaaaagcacttgataagagtgagagattttatgctccagccaatataaaaaatgttgctaaaagtacagaaccagtagtgtcattaggtaatcaaactggagaaggttggcttttaacaggtgagatggttgaattattaaatgaaggtgtagaaaacattatttgtatgcaaccttttggatgtttacctaatcacataattggtaagggttctataaaagaattaaagaggttgtataaaaatgcaaatataatacctattgattatgacccttctgcaagtgaggtaaatcaacttaacaggataaaacttatgctttctaaggcttttaaaaatatataagatttatattttgatatgttaaaagttaatgaatttaaaaatatactctatattaagtatctataaaaaagagttatcctattttttagggtaactctttattagttaaaaaattatatgtatactgatattaaaggggggaagtaatatgagtttagtatatgatgtttataaatcaaaattaggaaatttgtacatattaagtgaagatggttttatagttagtgtatacataggagatgaaaaatttaataatttaaaaaatgaatgtattaaaaaaggaattgatataaagataagtaaggaagatttaaaggaagcaataagccagatagatgattactttaatggaaaaagaaaagtctttaatttaaatattcgtattgaagggactgaatttcaaaaatcagtttatagggaaatgttaaaaataccttatggagaaacattgtgttattcagatatagcaagaaatataaacaatccaaaatcagtaagagcaataggacaagcaagtaaaagtaataaaattccaataataataccttgtcatagagtagttggcaaaaaaaatattggtggatatatggggaatcattctgatttgaaagagatactattaaatttagaaagacagagttaacttagaaagaaatgtttttattgttaatatttgatataataatagtaaaaagaagtattttttacaaaaacaatgaagaatttattttaatttacaaaaatgagggggaattttaatgtgtgataaagttatagcatcaaaatatcatgagaagggatttaattgtgcagaatcagttataaaagcatataatgaggaatttaatacagatataccagtttgtttaggaagtggactgggttcagggtgtggggttgctagtttatgtggtgcagtaaatgcatcaaatataataattggatacgtaaaaggcagaaaccacgaagatgaaagtactaaagctaaagtatatgctaaagatttaactacaacagtaagaaaagagtatggttcagagttatgtatagacctaaaaaaagatttagttgcttgtagagaaataatggatttcgcatatgatagtctaaaggaaactttaaaaaaagaattataagaaaataagctatcaagtataaattatttgatagcttatttttatagtcgatactaaataaatcaaatatattttagaattattatttgtaaataaacagcaaataattttaggatttttatttaatatagtttttatttatatttatttttgaatatgttatactttgtttaaataaatatttgtaatgagggagatgagaagattgaagaatctcaatttacttattaataaattatattcaaaaaatcataatgaagcatataaaacttttttattcttagaaaatgaaagtttaaaatcaaatattacatattgtttttttgactcattcctagaaatgattgataacgaaaactcatatattcgaacaaggggattgttattaatctctgcaaatgctcagtgggatattgataataaaattgaaataaatatagatagtatactaagtcatatcgtagataaaaaaccttctgtatcaagaatgtttattaaatccatacctaatattacaaagtataaagaaaatcttattaatcgcataaaaatggaattaagtaatgcagatataagtatttataataataatatgaaaccattagtagaaaaggatataaacgatacattatctaatattagttaaatattaatatagaaattgaatattatctagttacaattatttataactaagataataaaacaacaatggtgctaatttatatgtataaattaattatgaaaaatttatataagtaaaatatattaacataaaggtaaaattttgtatactaaaagggaatatttacagtttaatggcagttttaaaataataaattaaagctgtcatttttatttaaaaatttttagaaaaagtacaatagtgttaatgtgtgaattagataaggtgtatataataatttagatgatatgatataaaatatgttgtaaattaaatgttttctttgacaatatatacacaaggatgataatatctatatgaataaaagatagtgtgtaatttgataatatgtaattataacattatgatataattacaataaagtatgtaataatctgtagaaatttcaagctagttatctaagttttcggataactaaatctaaacggaatacataatgtattaaataaatgatgatactaaaatgatactatttttatagaaatttattgaggtatataattgatgaaaataatatattaaattatataatatattgagttttacataaaagcgaaggtgggaataaaaatgaaagaaattgctgatgctataacatcagagtatttaagctatggtatcaatgaagatattagtatctatgaaggtagattttgcatatatttagataaaaaatatagatgtaatgggaaaatttattataaaatgacacctccaatatctataagttttaaagcagacataggttgtgttgaagagatagacaatgaagatgacaatttagttttggattatgataatgctattcttgaagttcatggatacaaaattatttctataacaataaatactttaagtgaatttagtgtagaaggttatatcaatgatgactgcataaaatctaagaactcctatgttgaatatgtagattttaatataataaacttagataaaatacctggaaaactaattaaatacaatgataaggtatacgcaggtagaattgaatttgatataaatgattatgttgtaactatagacaagcgatatgattatagaaaagaattaaaatcagaattaaagtctaaatctggagcaataataactcatataggtaggattagaagaaaagatggtagaatttttagaacaaataatacaataaatcttttagatagaatatcaacagctttgagttttatgtgtggaagatatgtagggttttgtttggccaaagggtatagaagtggtaatgaagtttatagaatatggaatgaaaatcaaatatctccttttagatatgtaccaacatggtcagatacactttcaaattatcataatatggaaaaatatataagccttatgtgtaaaaagctagaagatttttattatggttctgctataaagagtgttgttgattggtacatagaatctcttggaagtgctaccatggaaaacaatataatatctgtacaaattgcacttgaaactttgtcatatgtaattctagtggaacaaagtaagatacttacagatgaagcatttgactgtaatttggcatctaaaaatataagactcttacttgatacatgtaagataccatatggtaaacatgaattaaatatatttgataatataataaaaaataaatttgatgatggagtggatttagttatttatttaagaaatagcatagttcatccaagtagaaagactcatagagctgtgttagaggttgaagatatttggaatataatttcaataggaacgagatatattgaacttgttttactctttattttaggttatagaggagaatattcaaacagattagtagaaaggtgttatggtgaagtggaagttgtaccttggaactagatttttatatttattttaaaatatatattgacatatattgccttatgctataaaatcaatatcataataataattcagaataacattaaatgctaagaaaagaaatagtaaaggtagttaatcttaaacagagagtttccgattggtgagaggagcaatagattttactttgaacacatctttgagcaggactctgaaagagtagaaatactttattaggagatttccggaatccttgcacccgttatagtgctagagtataataattttattgtacttaaagaggttagtgtcgtgaggcattaatgaacagaggtggaaccacgagagttaactcccgtcctctagcagaagctagaggcgggagttttttaatataattttttaagcgcgcagagaattatattgcaatagatacactttttaaaaaataatcaaaatattttaaaaattaaaaggcgagggagaatattatgaaaaatatattaaaaaaagtaggaatatttacaattatgttaggtttattaggtggagttgtaggttgttcaaaaccagataatgaaaaagataaggatgcttcaaaggaatctaaaaaagaagtagttgtagggtttgataatacgtttgtaccaatgggatttttagatgaaaagggagatacagtaggatttgacgtagacttagctaaagaaacatttaaaagacttggaatggaagttaagtttcagcctatagattggtcaatgaaggaaactgaattaaatgattcaaaaactgtagatgtattatggaatggatattctataacagacgaaagaaagaaaatagtatcatatacagaaccatatttacaaaataaacagataatagttactctaagtgattcaaaaataaattcaaaagctgatttaaaagataaagaagttggaacacaacaaggttcaacagcacttgatgcagtggaaaaggataaagattttatgaatagcttaaaaggtggagcaccagttctttatgatacttatgataaagcacttagagatttagagataggtagaactagtgcagttgttggtgatgaagttttaattagatattatatgggacaaaagggtgaagacaaatacaaggtattaaaagacgattttggattagaagattatgttgtagcaacttctaaagaaaatccagaactttgtgagaaaataaataaaacattaaaagaaatgaaaaaagatggaacttttgacaaaatttatgataagtggtttaaatagaagataagttagctgttaagaagggggcactaaaggcatgttacaaggtttagagatagttatagcaatgttttgtataacattgatagtatcaattccattggggattggagttgcatttttaagattatcaaagaataaattagtaagtggtattacacaatgttatatattgataatgagaggtacacctttacttttgcaaatgatagtcatattttacggattacctcttttaggaattgtatttgacagatttacagctggagtagtagctttcttcttaaattatgcagcatattttgcagaaatatttagaggtggaatacagtcaatcgatagaggacaatatgaagcttcaaaagtactaggatttgataaatttactatgtataagagagtaatctttccacaagtttttaaaagaatactagcacctatttcaaatgaagtaatcacattagtaaaagatacatctttagtatatatattaggattaaatgatattttaagaatatctcaaatagcaatgaacagggaagcaagtctgttaccattatttgaggcaggagcgatatatcttatatttgtagctatacttactaagggatttgaattacttgaaaaaaaatattcttattatagataaagttacaatattataggaggaggttttttatatgttgaaaatcaaaaacttaaataaatcatttaaaaaaaatagagtacttaaagatatttcttttgagttagaagaaggtcagattggagttttacttggtaagtctggtgcaggaaagaccacaatattaagatgtataaatggtcttgaagaatttgatagtggagagattataatagataatgaggtaataaaaaataagagagatatggcaaaaatacgaggaaaaataggtatggtttttcaaaatttcaacttatttcctcatatgacagtccttgaaaatataattgaatccccagttaatgtttttaaagttcctagaaaagaggctgaagagagggctagagaacttttaagattagttgatttagaagataaattaaattcttatccatttgaattgtcaggaggacagcaacagagagttgctatagctaggtcatgtgcattgatgccaaaagtcctttgttttgatgaacctacttctgcacttgatattgatactattcaaagagtagtcaatataatgaatagacttaaagacaaaggtatgacaatattaataattacacatgatgttgtcttctcaaataatgttgcagataaaattataagtataaaagatggtatagtagaaaatgttcaaataaaagaaaaaattgtttagagttttataaatataaactagggtagaattttataatataaataaagggcaagtaaaatcaaatatactatgcccttttgttatctcaaaatttaatcttatattttatgtttaagttacattataatttataataaaaataaaaggactatttaaatatataatgtgaataaatgtttaataatttgaaatatgataattttttatgttgaaagcttataatgattatgatataaattggttatagtatacaatttatgggtataacaataaaaaattagaaaggaatttttataaaatgattaaattatatggatatacaaaatgctctactgttaaaaaagctaaaaattggcttaaggaaaataatttagaatttgaagatatagatatggttcaaaaccctcctagtaaagaggagttaaaatcaatttataagactagtggatatgatataaagaaattttttaatacaagtggtatgaaatatagagaattgggtcttaaagatattgtaaaaactgaatctgatgataaacttttagaaatattggtaagtgatggtatgcttattaaaagaccattacttttggatggtaaaaatgtattattgggctttaaagaagatgtatggaaaagtactttgctaaaagaagattaggaagagataggtgtgttgattaaaattattaattaatacacctataaatttatgtattaaatctaatctttataaatattaattagcaaattcaaatcaaaaaaattcatatcaacaaatatattacttcttattacaaattatatcatatgttttatattaaaatattataatattacaacgaattgttacaaaattacttattattaaccatgaacatttgttttgtgctatcatatttatataagggaattgtcataaaaaatatcttgttcatacagttttatatagaaaaaagaaatgaatcttttctttatataagtatattttgtaaattgcctctatatttatagtttaaataatagtggttttaaaaatctgacaacaaaaataaaactttcaaaaaattaaatctaaaaagaataggagataaatatgagtattgaagatttatatgattttgaatgtgttcctttgaacaatgagattgatattgatgttttatttgaaaagatgatagaagatggaaaagaaaaagaatatacaccaattatagtcattgatgaaaaagtagggctattaagaaaaaatatagatatgattactaaagagtatggttctcttgaaaactatagagagtattgtttaacaaaatataatgaaattgatgtaaatcaattttttgattttaggaagagtgagatttcagaattattaaaggagctaattgatttagaagatgatttttatgattataaacattttagaccaattataaatatagatatatttcatgaatataacaaagtttacatagctaaaattccaacaattaaaccatatgaagtatttgcatacatacctattggaggatttaatgattgtcctagagatgaagaacatatagctattgcaaaatattggtatgaaaagcatggaatctttccaatcgcaattggatgtgatacagttcaatattctgtaaaaaatttaactaaagatggtaaaaaatttgatgacttatgtattgaattagtattttattgtgaggatattattatacaagggtatgaaaccttaaaggctcttaaggatgtattaaaacgctctacaatagtgcttttttggtgggattgatattctatcatttagatagtattaaattgttagtcaccaagaatccacttactttagttatggggagtgtgtcaaactaggtttttatacacagtgtagcatagtaatatgtttaaattacaaaggttaaaaaaatactttaatatttttaatattataattaatagatttaaaggtaattataatttataaaataaatactttatatgttataatcattaagaatgtaaaaaaataatatatagttttatagttcatatttttccagatatggaggtaaattttgtgaaggaaaaagaaaaattagataaattaaaaaaaatgttacttgaattaggcagtgttgtagttgcttattctggtggagtagatagtaattttttgcttaaggtcgcaaaagatacattaggtgaaaatgttatagctgtgaccattcatgcaatgatgcattcaagtagggaaattgaagaggctaaacaatatactcaaaattttggcgttaaacatatcatattaaatatagaaaactttgatttaaaagaatttaaagaaaatggtgttgatagatgttatcattgtaaaaaatatatattctctaaaataaaagaggtagcaaaagaacataatataaagtacatagtagatgggacaaatatggatgatttaggagactatagacctgggcttaaggcattgagtgaattaggagtgattagtccattaaaagatagtagtttaaaaaaagaagaaattaggtcgctttcaaaaatattaggattaaatacttttaataaaccatcatttgcatgtcttgcaagtaggattccttatggagttgagataacagatgaaaatttaagaatagtagaaaagagtgaagaatatctattcaatttaggtttttctcaatttagagtgagaatgcatggagagatagctagaatagaagttgggcaggaagaactaggtaaattttttgaaaataacaattttaataaagttgatactaaattaaaaatatttggctttaaatatgttacactagatatgtcaggatataaaatgggaagtatgaatttaaatgtgtagattattttaaaaataaataagttttatagttaatataaggaaacaggaggttttatgaaaaattatacattaatatcgccatgtttttttggaatggaaaaaatgctggctagagagattactaatttaggatatgaaataataaaaacagaagatggaagaataacatataaaactgatgagtttggaatagcaaagtcaaacatgtggttgagatgtgctgaaagagtacatcttaaaattgctgaatttgaggcaaaaagctttgatgaattatttgaaaatacaaaaagaataaactggtctagatatataccttatggagctcaatttcctatatcaaaagcttcctctataaaatcaaaattatacagtacaccagatgtacaagccatagtaaaaaaggctatagtagaaagcttaaagaaaagttatttagaggatggtttgcttaaagaagataaggagaaataccctatttttgtatttatacacaaagataaagtaaccatttctatagatacaacaggagatgctttgcataagagaggatatagagaaaaggcaaataaagctccaataagagagactttagctgctgggcttatttatttaactccctggaaagcaggtagagttttagtagaccctatgtgtggttctggtactatattgattgaagctgctatgattggtataaatatggcacctggcttaaatagagagtttatatcagaaaagtggagaactcttgataagaaaatatggtgggatgtaagaaaagatgcttttaataagatagataatgaatctaaatttaagatttatggatatgatatagatgaagaatctatagatatagctagagaaaatgctgaaatagcaggtgtagatgaatatatagagtttaatgtaggagatgcaactcaatttaaaagtgaagatgagtttggatttataatcactaatcctccttacggagaaagattagaagataaagacagtgttaaacagttgtataaggagcttggttatgcatttagaaaattaaaaaattggtcgtattatttgataacttcttatgaagactttgaatatgagtttgggcaaaaagcagacaaaaaaagaaaattgtataatggtatgttaaaaactaactttttccaatatccgggtcctaagcctcctagaaataataaataagttttacatgatttatttgtaaaatataaaattttattaaaataagtaaaacattatgatgccttgaaacgtctaattattgtgaggagatttttgtgaacaaatttaaagatttataggattaggaggagttaaatgaaagtgttaaagcttattactgtagtagccctgatgatgttatttgttactggatgtaatataaaaactgaatctccagaacaattagcgaagatacctgactatgatgatacaaaaaaagtattgtatgatggtattgaccagttactaaaaccagattcatctatgatattgccttctaatacaaaagaagtaggaaaaataaataaggtagatttaaacagcgatggaattgatgaattagtagtatttgaacaaaaagaagatttaagtaataatgtgagtcaggtagggtttgtaaccttgagttacaatggagaaaaatacgtacttggagaccattttttagaaaatggcgaatcaatagaatatgctaatttttatgatttggactcagatggatataaggaagttatcttattggttaaatccaaagacaaaacgaatatgcatatatataaagtagtagataatgaaataacaaaaatatatgacttggatgcatcatggcttcaaaataaagaagattttaatgacatgaaagtaaaaattggatatatagatggagatgacaagttagacatattgatgcttcatttgaataataagactaatgaaatgtttgcaagtgttgcaaattttgatgggaaaatgaaaatcaaagattctgttaagtttgaaaatgtaaaaaacttaagtgaattatatacaacattaggtaatgttgcttcatctgttggaaattcttctgcagctataaaaggtattgtacttgatattcctatattgaaagataataactatattacgcagatactttatatgaaagatgggaaaattaacaaagcttttagtgattatgataaaactattactaaatcttattatatacctgtagatgatattgacaaagataagattatagaaatacctatagttgcaggcagtacaggtaataataaaaatacttatagttctaaatcatctgcaactataagttggtatagatggaatggaaaagaaggtgctgactcaagtttaatatttacaagtcagatatattataattataaatataattttaaattatttattccaaataatttatttgataaaatacttgttgaacaggaatttgttggagaaaaagcagtatttaaattttactattttgactattcagatcgtaagaatttatttaatatagtagtagagagtaaaaacaaacttgaagatagaaaaaatacaggtactcaaaactctattgtacttcaagagagcgatgaatatactttcttactagttgtaaacaatgcaaatgaaatggataagctagatatgactatagacgcattaaaagaatatttctcattaatatatggttaatattatactcaattggaggttttattttatgaaggaaaagatacttatactagaagatgaaattggtattagaagttttgttagtataaacttaaaaagagaaggctatgaaatagttgaggcaggtactggaagagaagctatagaaaaaatgacaacagaaaatgatattacaatagctcttttagatgtgatgcttccagatataagtggtatagaagtatgtaaatttataagggagaattttgaccaagtaggtataataatgcttactgctaaagctcaagaggatgataaaatagaaggatttatttcaggagcagatgattacatcataaaaccatttagtataaaagagcttttagtcagggtttctgctcttcttagaagagtagcaaaggatgattcaagtgttaagtcgagtgaaatagtttctccaccatttatacttgatatagacaagagaaaattatttaaaaatggaaaggaaattgagcttacaccaactgaattttcaatagtgaaatatctaatatcaaatgctaagcaatcgttaagtagagaccagatattagacgaagtatggggaactaactatttatatgattttaaaatagtagatgtaaatataagaaggataagaaataaaatagaagatgacccatcaaagccaaaatatatacaaactatttggggttatggatactgttttagaaaggaagaataatagtgttacattttgaaggtctgagaaaaaaagtaataaaaaactattttataataattattataatggttactctgtttgaaggattgttcatgttttacatacaaaactactattatgattctgtcaaacaactacttgaatctgaaataaaatatgctgatgaatataatgctattacaatggaaactacaagttttgagaaaaaagtaaaaaatatatttgataaacaaccattaactaaaaattcagaatttggaatttcaataatagataaagataaaaatattatattagaccaatatggttttaaaagtaaagaaaaagcaaactatgaagatgttaacaatgcattaaaagatataaaaactaaaaatttaacaccttatacttatagaataccagatacaggggagcatgttatgagtatctccttaccacttaaggtaaataatataatagaaggtgttgttagatatacagtatcattagatgctattgataatgcaatattaaagcaagctacatggcttatattagcaggaatatttatacttattatagctatactaataagtcttaaatttgctgagactcttataaaaccattacgagagctaaagaaatttgcaaatgaattggctgtaggaaattataatataaaattagaaaagatgaagattgtagatgatgagattggtgatttagcacagacatttgaacacatggcacatgagattgacaaaagtgaaaaattaaaagaggaatttatatcatctgtatctcatgaactaaggactcctcttacatctataaaggggtggagtgaaaccttaggttatgaaagtataacaagagaagaactagacttaggtttaggcattatacaagatgaaacagaaagacttataaaactagttgaagaattattagacttttcaaggctttcttcagacaggataaaacttcatgttgatatagttgatgttgaaggtttaattgtaggtgttgtaaatcaacttaaagttaaagcagctgaaaaagatatatcacttttatttgaatttgaaaatgaatttatagagaacattcaaggagataaaaatagattaagacaggttctcataaatttaatacaaaattcatttaaatttacgagtcaaggtggttacataaaagttgtagcttctcaagatgaagagataacaaccatatcagtagaggataatggttcaggtatagaaaagcaaaatttaaataaagtgttagataaatttttccaagaagattataataaggctggtagtggattaggattagcaattagtaatgaaattgtaaaacttcatggtggaagaatgaaaatagaaagtgaaaagaatgttggaacaaaaataacttttaatataaaaaataaatttgctaaacaagcataaattcttagaaagaggattaagatgagaaacataaaaatgatagtagcatacgatggttcaagatataaaggatatcaaaaattaggtgacaataatatgactattcaagaaaaacttgaaaatgttttaagtaaaatgactaatgaaacagtggagataatagggtctggaagaactgatatgggagctcatgcaagaggacaagtggtaaattttagaactaattgtatggattctttggataaaattcaaaaatatttatatgaatatttaccagaagatatagttgtaaaaactgttgaagaagttgatgaaagatttcattcaagatacaatgtaaaatcaaagacttatatgtataaaattgacaataataagtatcacaatccttttataagaaaatatgctactcatgtaagtaaaaaattagatttagatagaatgagaaaagcaagtgagtatttagtaggagaacatgattttactagttttgcttcttctaaatctaagaaaaaatcaaatgtaagagaaatttattctataaatataaaagaagatgataatgttatagaaatatatgtagaaggaaatggatttttgtacaacatggtaaggataatagtaggtgctttgatagatgttggtctaaaaagaagagctccacaagatattaagtatatgcttgaatcaaaagatagatgtcaatcatcagatactgcaccagctaaaggactatgtctttggaaagtaacatattagtcaattatataaaactctctttaaaataaaaataaaataaattatatagttgacataaatggaaaaataaactattatatattttataagagagatataaaactttatatttaaatcctgtgagaaagagagtaacttctatgtgttttatagagagctgaggatggtggaagctcagcaaataagtattagtgaaaagaactttggaggatactaattgaatttagtatgttagtaggtaatctcgccttaagagaaagagtggataagtttatcttatcaattagagtggtaacgcggatatatttcgtctcttggtttttccaagaggcgttttttaatatatttaattattagtgtttatctggtatgttgaacatttactaattgattagctaagtttatcaataagagtggtaccgcggatatttcgcctcttagtattttaaaatactaaggggtttttttagtattaaaatgattttatgtgagtctaaattctcagagtcattcaatattaagaatttctataaaataaaaattataatttaagattgggaggaattaaaaatgaaggaaaaagtagtattagcatattcaggaggacttgacacatcaatcataataccttggttaaaggaaaattatgaagatatagatgttatagctgtttgtggaaatgtaggtcaggaagataaaatggaagatgtatatgaaaaagctttacaaagtggagcatcaaaggcatatgtggatgatataagtgaagaatttgtaactgaaactatatttaaagccgtaaaagcagaggctaaatatgaaggaaaatacttattaggaacttctttagcaagacctataatagctaaaaaattagttgaagttgctcataaagaaggtgcaaaatatatatgccatggatgtacaggaaaaggtaatgaccaagttagatttgaagctacaattgcagctcttgacccgactataaaagttattgcaccttggagaatttgggatataaaatcaagagaagatgctatagactatgctgaaaaacataatataaaggtaacagcaactaaagctaaaatatattcagtagatgctaacctttggcatgtttcaacagaaggtggagatatagagcacctagaaaatgaacataaaaaagatgtttataaacaatgtgtagacccagaagatgcatgtgatgtagctgaatatgtagaagtttactttgaaaaaggtgtacctaaaaaagtaaatggcgaagaattatctccagttgcactgattcataagttaaatgagttgggttgtaaacatggaattggtgttatagatatagttgagaatagacttgttggtatgaaatcaagaggtatatatgagactccaggaggaacaatcctttatgaagcacataatattttagaaagtgctactttagacaaagatacattacatttcaaacaaatggtatcttataaatacggagaacttatttacaatggactatggtattgtaaattaagagaatctatagatgcatttatggaacaaactcaagataatgttacaggaacagtaaaagttaaactttacaaaggaaatataaaacctgctggaatatttactgaaaatgctctttatgatgaaggaatatcttcttttggaaatagtgaactttatgaccacaaagatgcagaaggatttattaatttattcactttaccattaaaaatcagagctatgaaagctggaaaataataaaataaattatttaagagtgtataaaaactatttttaggtttttatatgctctttttttatttgaatttattaaattatacagtaaatagtataaaaaaatatattatagttccaaatgacttaataatgtgaaaatataagacctaaaatataaattttataaatacaatagttattgactctctcattgtaagagggtttatactgaatctaatgaaaatttatagtgaggagatagattatatgagaaaaataattgaaattaaacatcattcacatgattatgagtgtatgtggaatggtatagaagatttatatataaataaaaccggtgaatgccttccaaacgattttttctttttactgtcaggttttggttcattttgttatatgaaaacaaataaagctgatttgaaaagaatggtagctttgggagatggaaggacaaaacagatgtataaatttttagcaccaattgttggatttgaatacaaacatcatgagtttaaaaagtatgagcaagcattaaagaaagcaaaatctgaaattgatggtggatatccagttattttaggagctttagatatgtattatctaccatattataagaagctatatcataaagaacacattccttttcattatatattaatggtaggatatgatgatgaaagaatatatctgtatgattgtggtagaacagaattattacatctttcttatgataaattacgtgaaagcatgaattgcaattcccctggattaagcaaagaaaatactatttgcacaataagaatgaatacttcaaagaataaatataacattgctagagaagctattgctataaagcgtgatatgtttttaaatccatctaaaggatttttgggatataaaggttttgaaaagtttattaaagagttgccacagtggaacactgaattggataaagatgattatgataagattttgaccaatatggttatgttttttggaacagtaccaacaattccaaatgcaatcaaaggaattaaagaaccagatactgttcaatttaaaggtggatttgataaaatgagtagaatgctcaacagtattggggaggaatacaaaaacgactcttttatacaagtagctgatatttttgataaaactgctattataattgagaaaatatccaatattataatagattatttaactcaaacatgtgatgatacagaacaacttccgttattgttctctgaggtcttagagcatatgaaaacaggatatttaatcttggatgtataaaaaatatattgttgaccctaacattacgtaatagtgtaatatgaaaatatagcttgaatatattagtaggtattgatggctgtaaaattaaaatttgaggtgtggatatgagaacagtgaaacaagtttctgatttaactggaataagtgtgagggcattacattattatgatgagataggtcttttaaaaccaaataaaattacagatgcaggatatagactttatgatgatgaatctattaaaactcttcaacaaattttattttttaaggagattgatattcctttaagagaggttaaggaaataatgtcaagccaatattttgataaggttgaagctctaaaaaatcaaaaaaaattacttattttaaaacgaaagagactggatgaattgatagagcttataaatcaaactctaagaggagaaggaaatattgattttaaagagtttgatatgagcgagtattttaatgttttagaagaatttaaaagagaacataggaataagataattaaaatttatggtagtgtagaaaaatacaatgaatatatagaaagagttaagtctaatgaagagaaaattgctaaaatggctataaaacaatatggaactattgagaagtttgcccaagctataaaaacaaattttagcagtgatatattgaatttaggagaaaaatttgatagatataaaaatgattgtttaaaagaaaaacatccaaaattaaaagaattatatagaaagcttgtagaagatttaagtaagaatccttcttcaacagaccttcaagaaatagcaaaagagataacagatatatctaaaaaagattatgaaattttctctatgtatactggtgatgacaactggtattatatgattcaaaattatctagtaaatcctatgtggatagaagaagtagataaaaagtatggaagtggagcaggcaagtttattggacaagtactaaagacttatctaagagatagaaaaccaaagataaatacattgtatgaaaaacttgtagaagatttgagtagagattgttcttcaagggaagttcaaagcattgttgaagaaatagacaatgaaatgaaaagaagtaatgaattttataaaatagacaatggtgaaagatactttgattatatgtcagagctttatttacaagattctaactatataaaagtaactgataagaattatggtgatggtgcatctaagtttattggagaagcttttaagatttattttgataataataattgttgaaaatttggaagtaaaaaatatgtaagttttataaaagcacaaaaataaggatgtagattagctccatctatatccttatttaaagttattaaaatatatagtttacatcaaacttaacactttcaataatatttcccaaatatgtttttatactttcaacttcttctaaagattttaatttattttcagtataaattgctttgtccagaatattaaaccttaatcctatttcatcaaagtactcatgatttaaaactttgtaccaatggtttttttctttattccaactcgtagatattgaatcagcttctttttgagctttttcccaatcttcattttctatagatttttctaaaacagatatattgtctttatatccttctgtaaaatcatatagtttattgttaacgtaaaatccaaataatacaaataagatagtccatagtataacaaatgttgtagatttcaatattaatcaccctttttattttgaataaatattttgtcattttcatctaaaacacaaataagaacatctttaaaagtttctatgtgattagattttaaaatacccattaaccagttagtatctttttgagctatgtctagatttttatttattattctaccatccagtataagtgggataggtaaatgattaaaagctcttggaggagtactattgtagcttgatgctggtacaacacttagattaccatcagtctccaaaatagcatattgtacatcttttaggttgaagtatccttgaatcctaagttgttctaataattcatctatactaattctttcttttttaagctctttatatacaatttttcctttatctattaatacagaaggtttacctgataaaaatgaacttaattttctgctttttaatgataagaatgaaataagagtctgcatgattacaagaccagatattgctgcaacaccatttatgattggtatattattattttccattgggacagatgcaacttctgcaattaatagtgttataactaaatcaaaacagttcatttcagctatttcaccttttcccatgactctaagtgcaattagcactgttatgtataatataatacttcttattaatactactgtcatatctatcaattactcctttaaaaaatatttacacttagttagtatatcctatataaaaaatttaattcaaagtataaaaaaccttaaataattggattcaactatttaaggtttttttgataattttaatattaaattttttatggattttctgttacttttatttattttaataacagattcaacaaaactctttttatctcctaattttaagataaaatcaggatattcttcaaattcattgagttttattaatttgaaagaagaagatagatttttaaagttaatgattttagagttattcactaatacacttctttttttaaaataaatttcttttttacttatatttagtatagttaatatttgtttaagatatattattatatcttctggagttctatcaaatttgagttcaaaattttcatcttcaaagtagggaatataatataaaggtgttttgagagcaggtaatttattatataattcttcaagaatatcgatatttttaggggagttaaagaaaaagcatttacatacgttcattaaatccacagcatctgaaagtgagttatgtttaatatctccttctacagaaaaaatttttttcatattcagtaaagatatttgcttagataagattctattattgtatgtaatatgttgagatataaaaggttgaatgtcaatcatcatattaaataactctaagcatttacctgtatatttatatactctaaatgaagttagaaggccagttatatcaaaatcaccccaattatatattgtaacatcatcaaatttacaaaaccatttataaaaatcatccataacatataaaagattaggagcattattgatatctagttggttcaatttggttaaatttttacatttatttgaaagtattttattgtattttggcttaactaaagagtaataattatctattgtattaaattcgttatcaactaaaactccaccaatagaaattaattccgcaccattatattcttttggtttatttttattatcatctagtatattaaattcaaagtctataaataacttgtatttcataaatctaaagcacatcctcaggtaaattatttattgagcctaagcatcataagaatcaatagatataatgactctaaacatcaaaggttcattacaacttttatttatttcataatttaattcaaataaatcttttaagatataatttataagtattctttcccaacccatttttaaattaactttagagtctattaatatattttctatctttttaaatatttctatatttgctggtattatactgagctcaatattacttttaaacgggttagactgtaaatctgttataagtatattttttaattcctctgtaagttcagaaattaaactatcacctatgtatttttttatgatttcctctctaatttcttttaaatttagcaatattagtacctgctacttacatagtagcttttcctttccttttaatactattattcatttttgaatcttatttagatatattttaagattaaaagtctttagctatataattttttacccatttttaacttatattaacatattacaggcttatatctccaccctgcttacattgaggatggagtatattgcctattttgataaaaatgataggttgttatttgcctattcctttttctgataatttttctaacatatctttggtcattttatctaaatcataactaaacttaaagttccattcttttactgcactactactgtctagagagttaggccaagaatcagctatactttgtcttacagggtctacatcatattctatcacaaaatcaggaatatatttttttatagaatcagctatttcttcaggagaaaagctcatagcagtaatattaaaagcatttctatggatgagtttatccgctggagcttggattaaatccactattgattgaagtgcatcaggcatatacatcatatccatttttgtaccttctgctatgtaagatttatatctcttattttttaatgcctcataatatatatcaactgcataatctgtagttcctccaccaggaggcgtaacataagaaataagacctggaaatctaacacctctagtgtctactccaaattttgagtgataataatcacatagtaattctccagaaactttagtcacaccatatatagtattaggtctttgtaatgtatcttgaggagtcatattttttggagaattttcaccaaaagcagcaattgaactaggtgtaaaaaatttacaatccaattctttggctatttcaaggccatttattaatccattcatatttaagttccaagcttctaggggtttactttcagcaactgcagaaagtaaagatgctagatgaattatagtatctacatcatatttttttgcaatttcaaaaaaacgattcttatctgtaacatctaatatctcaaatataccagattcacatactggattaccttcttttactctccttgaactagcgattacattttgttctccatactcatttctaagctttattgttaattctgaacctatttgtcctaatgcacctgttataagtatttttttcaattttacaacctcctaagggtttaatttatgtagtactacttatttttattttagcaaatcttttgtttaaatacaaagaattaaagataataatatacgacttaattgaatgaagtgcagtaaattcctaaaaatttaaagttgagatataatggtctattgtataacaataaaagactagattaaattattatatagattgtgtgactaagtcacagaaagtatagttaatttaatatataataaaagcatatcaagtaaagctttaaattaaagtaactttatataaaaagtaatataaattgataaaattataaatttatttatagtgaatataggttggattttatagatacaaaaatagtatatatgatatgtagaccattagcatgtttaaagtagcaaaacatataaaataaaatttgaaaggaagtataaaaatgacaagaccatcaatatatcatagccaaggatacacttgtgcagaggcattaataaagtcttataatgaggaacacaacacagatataccaatctcaataggaagtggtatgggggttggaatgaatgttggaagtgtttgtggagctgtaaatgctgctgttgttataatagggtatttaaatgggcgaaatagtaatttagatgaaaatatagcaaggaagtattcaagagagctattgaataaagtaagaaataaatacagctcagaaatatgtgtatctcttaaaaaaaataaagtaacttgtgaagaaataataaatttcacatatgatgctctaaatgatatgctaaaaaatcaaaaataattctaagaaacaagtattttacattcgatagaatacttgtttttttatgatatttttaataggtattagtttattataatttttaaatcaattttattatattttaattgaaataatctactttgaaaattactaactgacaaaagaatatgattatagtatagaaaaaatgtaaattatttaatattaagtgagagtatatgcttacctatataaaatcgtataaattaatggctaaatttataaattataaagaaatatataagaaaacaaaagaattaattagtataatataaagttaaaaagtgaaaatttatataatttatttataaagtaaagaaaaaatagaaatttgtaatgaaataaaaagtttatgacataatatggtataattagtaaaaatatagagattggaggaattgctttgtttatagatgaagaattagaagggtatatattaacatgtaaaatatctgaagactttaaaaatatacctgaatatagtgatgaagagttttatgttacagtctataaagatgaaagttctgactctgggtactatgctttattagaaaataaagaagaaagagttgtatgggatggagaagttgttgccaataatatttttaataacctttggattgtagtaaataaggttaaaactggataatagtctaattatatagtatttgtaatattttaaatgaatttttacatatttgagatgagtaaataacaaagattattcgatactggaggagtaattcaatggaatatagttatagtaagatgaacttaaaaaaaggggatattgtagaggtaaatttagagaaacaagccaatgtaatattgttagaccatataaattatgtgaaatttaaaaatcaaagaaattatgattactatggtggatttgcaaagaaaaatccatgtagaatgagagttcctaatactggaacatggtatctagtagtaaatcaagatggaaatagtggaatagtaaacttttcaatcaatacaattcaaaattaattttagaatattggatattcttactttttgtactttttatatagttaaaataaaattaataagcaattattataaaataatgtgggtgcctcaaaatgaattttataattcacgagacactcttttttgtataaactcaaatatactttatcatttcaacaatgaaaaagaggcgtatctgtgttttgagatagcctcatttatcatatatcatatatagaattttaattattcttaactaaaattttttccataggttatctgtacaattaaaatatttattgttagcatacagctccacctgtaaggtgtaaaagagcctctagtatctcttcttttctttccaaaacttcatctgataaaagcatttctataaatttatcagcaccaattctatcgatagttattccaaaacgttcacctgtgttaccctgttctctaaataaaagaattgctttttcaattaaagtcataagttcctcttttgaaaataatctatcaatctgtgttccaggacgaactgattttccccatttccctcctatatagactttataaccagattctttttcttcaatactatcaaaattacaactttctatacacttaccacagttattacatagattactgtctatttcaagtttacctttatctgttaatttagctgctttaacaggacagacctctacaacagcacattttttacaaccaacacaaagctctgaatcatagtcaggtacacgttgaccaacaattccaagatcgtttaggtcaggtttaatacagttattagggcatccaccaacaccaattttgaacttatgaggtagttttacatcataccaatttttgtaaaattcttcgtgtatttcagtagcaagtgcctgtgtatcagctagaccatgaacacaaacagtacctttacaagccacaacaggacgaacccttgatccagttccacctgttattagattttcgctagcaataaattcacttagagcttcaatatcttcaaattttacaccaggtaattctactgttagtctagtagtaaatgctaactgaccgtttccgaatttttcagcagcttctgcaattttttttgcttgtgatgcatttattacaccatttacagttattatacgtgctgcaaaatgttctccatccctgcttggtagaaaacctctaccttttacttcctttttttgttctgctgtaacattactcatatttactcctccattaccttaagatttggataaaatagtattccaccttcaagaactttcgtatttgtatagccaaagcgtcttaagcgattttgcgccatatagctatttttacctttagcacatataagaagaattttttcatccttagcaagaccttcaatttctccattaatttcaccaacaggaatataacgtaaactaggaatagaaggagcttttgaaacatcaagtttagtccaactgtcaaaatcctcaatttcgtcaagtaaaacactatcaagttctccgttaagtttattttgtaaaacatttactgccactacaaaagggtgaatagctgttgaaaaaggtggtgcatatgcaaggtccatactttctaatgaataaaggtcagcgcctaaagttattgcagtagcagcgatatctactattttatcaaccgctccaggtcccataacttgaacacctaataattttctagtatttttttcagcaaccattcttataataaaattagatgcacctggataataatgagctttatcatcggtagctatggttacagagcaaacattataaccttctttttcagctatttctttacttagacctgtttttcctgcattgagctcaggtaattttactactgtcgttccaagaacaccattgtaagttttagattttccagatatattttgtgcgcaaattctaccctcatgatttgcagatgaccccataggtgaccatgtaggtttatttgttaaagaattttttacaaaagcacagtctccaactacgtatatatctttatcatttgtaagcatatattcatctgcaataattgtattattaggggcaaattctaaacctgtgtcttttagaaaacctgtgttaggacggattccaactgacataaccactaaatctgttttaatagctctatttttagtacgaagtttttcaactttattttcaccttcaatacctacaacctggtcacctgtaaaaatcattatgcctttatcagccatatgattttcaacgtattcagcaaaatcagtatcaaatccaggcataacatgttcagccatatcaacaacacttacacgtatacccattgcagaaagattttcagcaatttcaagaccaatgaaacctccaccaataacaacagctctcttaataccgttttcaatagaatctcttagttttatagcatcatttggagtacgcataaagaatactccaggtaaatctattccaggtattggtggttttattgggtctgcccctgtagcaattacaagtttgtcatagcttagattttctttttctcctgttgaaagcgttttcaaagttacttgttttgcatttctatcaatagacgtaacttcaactccacaacgaacttctgctcctgttagtttagaaaaactttcaggtgtatttacgattaaagatgatttatcttcaattatcttaccaacgtaatatggaagaccacaacctgcataagaaatatcatcacctttatttagtattgtaacagagcaattatcacccatttcacgttttatttttgcagcagtttttgttccagcagcaactccacctataattaatactttcacaatatatcacactccaatctactttataactctataataaaattatacttcttgacaatatatttgtaaaatactaaaatattaataaaatcataagcatttactaatgtttgctaaggttgtgataatatgacaattcgtagtcttgaaatctttgttaaggttgctgaatgtggtaaaatgagtgaagtagcaagaaatatgtatattacccagtcatcagttagccaagctatttcagaaatagaaaaagagtatggtgttaagttatttgatagaatttcaaaaaaattatatttaactgaggcagggaaaaaacttcttggatatgggaggcatcttttagctgtaaatgaagaaatgaatgattgtatgaagcattgtgcaaaaaatatccgtataagagttggggcaacagtaactgttggtacatgtgtaataagcccgataatgttagaattatacaaggtaaatcctcttatagaacctgaagtatttgtagaagatacaagactgattgcaaaaaaattacttaatagtgaattagatattgcgattgtagaaggaaaaattaagcacccagatattgttacaaaaagcattattaatgataatcttgtacttatatgttcacacaagcatgagttctacaaaagagactctataaaagtttcagaactttcaaatcaaccattaattatgcgtgaattaggaagtggtacaagagcacaattagaaaagcaattaaaagaattaaaaatcccaatgaatattagatggtcatgttataactctgaagctatattaagagcagttgtagataattttggcattgcagttatatccgaattacttattgaggattatttaaaaaagcatcttttgtgggcttgtgatattgaaggtattaacttacatagaacattcgatattgcatatcatagaagcaagttttttacagaaaatatttcagcattttttgatatttcagtagaatatgggaaaaaacaagcgagaaagaagagtagaagtgtaaacagtttataatatatctaaataaaaataagagtatatcaatatactcttatttttatttagatatattagcctatattaacgccaaaatttttacacaatcctgcaagtccatcctcaaatccagaacctaaagcattaaatttccactctccattatgtctatatagttctgccacgactattgctgtttctatgctaaaatcttcacccaattcatatttaataagttcctcgttagtttcttcattatatattcttatatatgaattttcaacttgtccgaaattttgtcttcttgtaattgcttcatttatagtaacactaaatgatattttagcaatattttgaggtattttagataagtctacatttatttgttcatcatcaccatcaccaacacctgttctattatcacccatatattcaacagctccagaagcgtgttttaaattattatagaatataaagtctccatcattcgttacttttccatcagttccagttaaaaatgcagaggcatctaaatcgaaatcaaatccaccatcatatttattaatatcccatcctagtcctactattactttttttagaccagggttactttttgttaaacttactttttgtccttttgctaaagttatacccatttaaaccaactcctcattataaattttttattgtaattattacttatatgtattaattaattcacgaagctcttcattttgaccaattcctaaagcattaaatttccattcttcatttctacgataaatttctcctgccaaaactgttactttaccagaaaagtcttcttgaagattatatttaaataattcttgcttggaatttgaatcaattaatcttataaaagagttgttcatttgaccaaaatcttggtctctttttttagctttgtatatagaaactccaaaaactattttatgtacatattcaggtatgtcttctaaattaacaattatttgttcatcatcaccttcaccttttccagttaagttatctccagtgtgtataatagctttagaagggtgtttaagatttccaaaataaaccaagtcacctctaacattcattttatcttggttagtcaatgctattgcaaatgcatctaggtcataattttttttacccaatttattcatatcccatcctaagcctactactagattttttacaggattattatcttttactaagctaactctttgtcctttttgtaaactaacactcattttaagttctcctttttatatttttagttttattgatggtatcaagtataagaaccatattagctatattatatacgtatttaggctaagttggctatatttataaattatttattatataactacatgaatattttataatttaaacatattgacattatatgatttaaattattttgtagttttataatatttaaatttgtatttgattgttataaagtaaagtaagtaataaagttagactcaataattctaaaatttctaagcacactatctaaatgagaacgtatttggaaatacttgtataaaacaataattgatacatttaatttttatcttaaaaataacaattataatatataaatagaaagtataatatataaatagcaagtataatataacatataaaaagttgaatttgtatatgttaattatacttgctatttattgttagttattctatttttttaaatccattacctaaagcttcatgtatatctgtaattataataaaagcattagggtcgacattttttactaatttttttaattcgacaacttctttcttttcaactactactaaaagtacatttttattttctccagtatatgcaccttctccttttagaatagttgcacctctatctaaatcttccattatttttttacttatatcttttgaaaggtcagatataatagtgaatgatttggaataattaaatccttcaataagcaagtcactaacttttactaaaatgtataaagccacagttgaataaagtgcaatttcaacctgtctatttactatacctgataaaacaactacaacgcagtctacaatacccattaaaacaggtatactaaatgtaggaaaatatttatttagtaggagtgccattaaatcagttccacctgtagagccatttattctaaaaataagtccttgaccaactcccattaaaatagaaccagatataattgcaagatacatatcatttgttatatctaatgtagccatatttgcagtaagcttaagtgctatggtaagaaaaattattcctaaaaccgttttaaaacaatctttttttgaaagtattttgtaagcaaatatgaataatggaacatttaaaagtaaattgacaatccaaagttctacaccgaataatgaatttaaaacaactccaagtcctgttataccaccagcagcgattgcatgtggattaaaaaataaattaagagaaatggccattaatatacagcctacaattaatattaaaatttctgaaaaagttattctatcttttttcaataacatcactccttatatatagattataatatatattatatagtttttccaatttttaataaaagaaataaaaatatattataaaaacaatttgattggaattttcagaaaattaatgctataattaaaagtaaatttaaagggaggttataaaatggctaaattaactctagaacatataaaaggaaatacatattatattccactccctacaatagtaggtgtatacgtagatggtaaagatgcaattttaattgacagtggaaataataaggatacagctagacaagttttaagattattagaagaacataatttaagtcctaaattaataataaacactcattcaaatgcagaccatataggaggaaatgcatatttgaagaatcaaacaaaatgcaagattgctacgactaaaattgaaggatattttacagaaaatccaatattagaatcagcatttttatatggtggctatccaagtaaagcactgaagaataaatttttattagcaaaggaaagtgaagttgattatattataccttcaaatggcaaaattgtagatacagaacttgaagcgatttctcttccaggtcattattttgaaatgattggtgttagaactccagataatgttttgtttgttgcagatagtcttacaccagagaatataattactaaatatcattttttcttcctactggatatagattcacagtttaagacactagaaaaattgagaatgttagaggctgatttctttgttccaagtcactctgtcaaaactacagatataaaaagtttgattaatattaataagaagaagatggaagaaataatagataatattaaaaaggtttgttatgagccagttatgattgatgaagttattgaaaaaatgtgtgatttgtacaatgtcaagcttgatgctaatcaatatgtgttggttggaagtacaatacgttcttatataacttatttatatgagaataatatggttgaatatatatttgatggtggtaagatgatgataaaagctgtgtaaatagtaataattttcaaattatatgatgaaattgttttagtatgactgttatttgaaaagtaacataaaaaaatttatataaataagctaagatgattgatataaagttactgataattttaaggtaatatatacgttactataatattatgttattatttgtaaataaggggataatttataagcaaattaaagaccttaatttacaggaggaatagtgtatattatgaataaaaaattcaaaaaattcagtaaaaaactaagtatattaattttagttttgactatgtttctttttaataatttaactgcaaatgcacagattaaagaagattcaataataggaattgatagatatgaaacagcaggacttatagcagatagacaaacttatgatactgtaatattagttaatggagataaaaatttatctgatgggctttcatcaagtggattagctggagctattaacgcaccaatacttttgactaaaaaaagtgaaataccaaaagctactttaaatagactagataataagagtttaaatgttgtaaaaaaagtatatataattggtggttataatactattgaaaattcagtagaaaaagatataaaaagaaaaggtattcaagtggaaagaataaatggtaacaatagaattgaaactagttataatgtagctaaaaaaataaatgaagtaagtagtgtaaaagaggtaatgcttacaaatggatttgtaggagaggctgatgctatgagtatagcacctgtagttgcaaaaaataaaggagctataatacttacagatgggaaatcagttccatttaagactgaaggtttaaatgtttacgctataggtggcaaatctgcgataaatgaggatttagtaaatgaaactaaagcaactagaatcggaggaaatgatagatttgagaccaataaaaaggtaatggaaaagttttataatggagcgacagatttttatataacaaatggatatcaattagtagatgcactaacattatctcctttagccaaagaaaaaccaatcgttttagttgctgatggaagtaataaaggtattttaaaaggagctaaaagtataacaaaagttggaggtattgatgccaatatatataaacagtgtttagatatgattaaatataataatatggatgtgactccaaatattttaaaacacttaacttcagttgaaggaaatgaagtttctgaaatacttatagaatcagataatttaggtgtggttgttgaaaagacgaataccaataaatttgagtttgattacgtaagtgtaactaatgaaaaaaattgtactttttctgtatataaagaaaattcttctaataatgtaaaaaatggaaagctagttgtaagtgctaagaaaaaaatagataagaaagatagtgatttgcaagatatgaatggcgacaatatgataaatgcaaataaagataggatggtaaatgtgataaaaattggagttcccgataaaatgtattctaattttaaagtagatgttgaaagtggttcagtagaactttataatattaaaggaggagctactgttgatgtcaatgacggaattgctaacattgttgataacaatgtgacaaatcctttcaatataaatactaatagtgggatttcaggtgtaacagctgaaactatatcatctgagataaaatttagagcaaacaatggaattgtaagtgtaacagctacaaatataaatggcaatataagtttatttggaagcgataataaaggtacctttgatggaatatttaaattaaatctgaaaaaagaaccatcaaatttacacttgaagttagttggaaatgggataaataaattgccagaaggttggtctaaagattatattttaggaaatggacaaccaattattgaagttaaaaataatggcataaataatatatcaattggagaataaaaacatatgaaaataaagtttatatagttttaaaaattatagaattttaaaatatttatatatattctttaaataaaaaattattttttaagtgataattaagtatttatcgataaggctatggttgtaaaaatcatagccttatttttatattataaataaattagagtatttatcaattcatagtagataaaattgaaattaaatataacaacaaaaaatgaaaattacaattaatttaatgttaaagactcaattatttggatgtggaatggatagtacaagtagtatataaaaagtattgactggacaaataactatattttattttaaatatataatataatgtaataaaatatatcaaatgtagaaggtgataacctatgaaaaaaataacaataaatgatattgctaacttggcaggagtatctaaaagtactgtatcaagatatctaaataataaagatatcagtgattctactaaagagaaaataaagacaataatagatgaatatggatatgagccgaatgcatttgctcaaagtttgagagctaaaaaaacatactttattggtattataacaccgtgtttagattcttttgtaaaatctaaaattatgatggcaatagatgaagaactcaaagaattaaaatatacatcactaattattaatactaatagaaaaataaggtcagaaatagatagtatatcaaagttagctagtctaaaagttgatggaataatactaattggtaccgaaataactaaagaacataagaatgaaattgaaaagttagatataccaatggttgtagttggacaaaaagttgatggtatcaatagcatagtgaatgatgattatggagcaggatataaaatgggtcaatatattgctaataaaggttacaaaaacattgtatatttaggtgttgatgaaagtgatatatcagttggtttaaatagaaaaaatggagtacttaatgggttaaaagataaagggtatgatgcaaaagtattttatactgactttgaccaagaaacgtctatacaaagaagtggagaaatgctagaaagtgaaaatccagatataataatatgtgcaactgataatatagcaatagcaacaatgaaagaaatcaataagagaggtaaaaatataccacaagatatatctgtagctggatttgggggatatgatgtattgtctattataagccctaaacttacaacaataaagtttgaaaataaaaatgcaggtaaagtagcagcaaatacgatagtgaacttaatacaagaaagaaaagaaccactattaaaggagattaaatttgaattaatagaaggtgaaagtacaataaataaaaattaagatacacattacatatattagtaatgtgtatttttttactaaaaaaactataattctaaaaattaggaaaacttttttgaaagaaatattgcatctgaaataaatttatgctaatctttaattaaaccggtttcgaaaccggtttaattaaaccgaaagaatagcacaatgagtgcaaaaataactgattgtaacaaagtatcaaagtaattattagagtacataggaaataaacaaaatataaaaggtgtagcacattgtgtaacaagattaagaattgttttagatagtaataataaagcaaatataaaattacaaaagaaaaggaataaaaatatgtacaaagagcctaaatatagaaccatattagaatcgataaaagaagaattaaataaattaagaaatatatctttaaatgataaatataaaccactatttcatatacatccacaacatggactacttaatgatccaaatggattagcatattataatggtaagtaccatgtattttatcaatggtatccatatgatgcaactcatggaatgaagcattgggcttatgtaagttctgatgattttgtaaactggaatagagaagatgtagcattaataccaatcgaaagttatgaatctcatggagcatattcaggtaatgcgatagaggtagatggaaaattgcatatgtattatacagggaatataaaatatagtgcagaagatagatatgcatatcaaaacttagctataatgaacaaggatggtaaaataactaaatatgaaaataatccaatagtaagtgaaataccaaaaggatatacaggacatgtaagagacccaaaagtatttaaaagaaaggataaatactttatgttacttggagcacaaacaagtgataaaaaaggagttataatagtatatgaatctaaaaactctatagattggaattttaaaggagaattaaatgtaaaaaatatagatgaagattttggttacatgtgggaatgtccagattatattaatatagatgaaaaagatatattaatattttcgccacaaggagtagaacctaaaggatttgattatcaaaatatatataatgtagtatatgctattggtaatatggatttagataatttaacatttgaaatagatacaatgaaagaactggaaaaaggatttgatttctatgctccacaaacatttataaaggactcacaaataatactatttgcatgggctggaatgggagaagttttataccctacagataaaaacaaatgggcacattgtctaactgttccaagaaaattaaatataaaaaataacaagctattgcaaatgcctgtagatgaattaattaaattaagatatgatgaaacaagtgggcaaaatactataaagaataatatcaatattatagaaaatgatgaaaatgtatatgagcttaatattaatataaaaaatattgacagcaataaatttgggctggaattattttcatcacaagatgaaggtgtaaaattagaatttaacaaattaggaaacattgtaactttagacagaagcaactttaaaaaagttttcggtgttgaatatggaacaaatagaaaagaatatataaatattgatgaaaatactaatatcaaagtactagcggatagaagtgttttagaaatttttataaatgatggagaagtagtatttactagtagaatatttgctaaagaaaattctaatcaaataagggtttatagtgataaaatagtagagtatgagtatactaaatttaaattaaagcaaggtattgaattataaaaacacattataaggggtagaaaagatgaaaaaagtaattagtataggagaagctttaatagactttatacctaatcaaaatggttgtaaattaaaaaatgtatcagaatttagaagagtagcaggaggagctccagcaaatgttagtgttgttgtagcaaagcttggaggaaaatcaagttttatatctaagttaggaaaagatgcatttggtgattatataatagatgtattaaatgaagtaaatgtaaatactgattatgtattgagaacaagtaaagcaaatacaggacttgcttttgtatcattaaaagaagatggtaatcgtgatttctcattttatagaaatccaagtgcagatatgcttttagaagctgatgaggttaaaaaagagtggtttaataattgtcatatcttacatttttgttcagtagatttaatagatagtccaatgaaattagcacataaaaaagcaatagaatacgcacttgaaagtaatagtataataagttttgaccctaatataagattacctttatgggatagtgagcaatcttgtaaaaaggcaatatcagaatttttaccttttgctcatattgttaagatatctgatgaagaattagaatttatgacaggagaaaatgatatagaaaaatcattacataaactctttgtggggaatgttgaactagtattatatacaaaaggaaaagatggagtagatgcatacactaaaaaagtaaaaggtatgtgtaaaggggttaaagtaaatgcaatagatacaaccggagcaggagattcttatataggttcatttttatacaccttattgtataaacaaataacattgaatgatataaaagaaatgaaacaagaaacgttaaatgagtatttagaattttctaattattatgcagctcgtagtacaactattaaaggtgcgataagttcatatgcaacaaaggaagagataactgaatttataaaaaatttatagtaggaatgagtaataggttttgaaggaagtaacatgtaaagagtttttaaggatgtttactatgaaaataattaacatataaaaagcaataaagaggctgtctcaaaatagatataagcctctttatcattgttgaaatgataaaaaatattttaattattgttactttttagaagaatatatatcttattttaaataagcaaattatgtaagatttatttatattatcaatactttacttggagtattatgtctttagcagttatctacttcaattgaattatctaaaatataataaatttgttttgcaaattgacgagaatgtttttctttttctttattcataaaattaggtttacctaaatcacgttcaacaagcattcctatatattttaactgtgaatgcttacagtagcgcttcataccattttcccaaatatcagcacccttttcaggtctatatccacatgttgtaataagtgctactggttttcctgcccatagagcggggcctttctcattaccatagtacttattcattccatacaccaatctgtcaagtagtgctttcattggagaagtgcagtaccaagaataaattggagtagcaaaaacaattaaatcacacataagaattttcttgaaaattttctgaacatcatctttacaataacatccaaaatcaaataagttatcctgacattttttacaagcaatacatggctctattttacaatcatataaccatattacttcaatatttgaattataattttctaattcctcaataaaaggttttaaaatagcagcagtattaccttttttcttaggacttcccataagaatgcatatttccatattgatacctccacagtattttaaaatagtttttagtgcttaatatagttttaggatactatgagaatacgttaacaacaatacactttgtatatttttaataaaattgaaacaaattgttttatcaataaaagttggaatgtatctataattaaaaatattttaggtatgtttttacatatatgtgtgtagttaactatggtaatttattgtaaaattatcttataggattataattgcttaatttatgattatatttaaaatcttggaggtaaaaaatatgtactcaaatgaagactataaatttatagaagaaaatgcaccatgttatatatatgatgagactaatataattgaaaaatgtaaggaattgaaaaataatattttaggttttgattttttatattctataaaaacaaatccatataacaaaattgtaaaaagcattgcagagcaaggttttggagcagatgcttcttcaactaatgaagttatgatttcatcagaatgtggagtttctaaatatgatatttattattcatcaccaggcaaaacagagattgatatagaaactgttttagataaatgcataattattgcagatagtattacagaaatagaacttataaataagatatctaaaaagcataatcagaaagttaaaataggaataagaataaatcctgattttactatggatgatgatagtgctaaatcaagcaaatttggtatagatatagaagatatgagcagtgtttttaagatgttaagtatgtgtgattatgtatctgtagttgggattcatatacatattaaatctcaggtattggattttgaaaagttaggacattattatgaaaaatgtttttttatagctttaaatttaaataaaagtaagtatattaatattgaatttataaattttggtagtggacttggagtagcttatgataatcttagagaaaatccacttaatcttaaagagctttcaaaattaactcaaaagattgtttttactaattcaaacacactgaaatcaagacttcttattgaatcaggacgtttcatagtttgtaaatcaggtaattattatgttaaaattgtagatattaaagtatcaagagggaaaaaatatcttattgtaaaaaatggacttaatggatttatgagacctattatttctaatttaattgaaaatattacttgtggagtagaattagaaggtcaagagccattatatacatcaaatcatgccttttctctttcagtattaaataatttaaaagaagaagagtatgtaaatgttgttgggaatctctgtacatcattagatgtaattgcaaataatgttaaattgaaaaaagcaaatataggagatttgatttcaattagtaatgctggaagttactcctattctttatcaccactattattttcgagttatgaatttcctaaacaatattataaaagaaaagatggatatattgagtaaacaataggataaattaataaacttagtattattgaaaaaatttaaaatgcagggggtgtaattctatatggaattgtggaaaagaaatttatttgtatgttggataggtatgttttttagttctatagggatgagccaaatagcacctatacttccattatatattaaacagttgggggtaactgatgttagtttaatacaacagtattcaggtataatttttggatgtacctttgtagtagcagcattcttttcgccaatttgagggaaagctgctgataaatatggaagaaaatcaatgcttttacgtgcaagtattgggatgggaatagttatatttaccatggcgtttgttcaaaatgtttatcagttattaggattaagaatacttcaaggagtttttacgggttatgctactgcatgtactactcttattgcaacacagacagataaaaatcattcaggatgggctttgggtactcttgcaactgcatcaactactggctcattaattggtccaacagtaggaggatatatagaatcaatcttgggtcttaaaagtacatttattataacaggaggattgttgtttgtatcatttatcatctctattttatttgtagtagataattttaaacctaaagaaataaaagaatcaatttctatacctaaagaacaattaaatatattgccaaataaatttttaattgcatctatttttgtaaccacattcattactcaactagctttatactctatagaaccaattgtaaccatatatatatcacaacttacaaattttgcatcaaatgtagctttaatagctggattgacattttctgcatcaggattagcaaatttattagcagctcaaaaacttggaaaaatgtcagataaaataggtcctcaaaaagtattgttaatttcacttttatgggctgggattatatttataccacaagcttttgtaaaaactgcatggcaactgatgttgttgagatttttattagggttgtcagttgcagggcttaatccttctgttaacagcttgcttaaaaaaattgcaccagaagaatatgtgggaaaaatatttggatataatgcatctgcccagtatataggttgttcatcaggagcatttttagggggacaaatatcagcacatttaggtattagaacagtatttttttcaacaagtttattgttgtttatgaatgcactttggatgtataaatttactggattgtttattaaagataagactaaataatcatactatttacatttctaattttatgatgtaaaataaatattttttatgtaatttatcatagaattatataaaaaataactctatggtaaaaattggaaaatattattatcgacaaaatctttgacttaaaaactatattgcgatagtattaatttaataaaagtttgagaggggcgtaaggttatgacaatttcaaaaataccacaagcagaattaaaagttatgaagtttatttgggaaaaaaatgatacagtaacatcaaaagaaactattgaagctatggaacgaaaatatggttggaaacaaacaactacattgacacttttatcaagacttgttaaaaaacattttttaagtgcagaaaaaatagatagatacactcattatacaatagttgttggacataaggagtatttaagtgttgagacaaaagattttttaagcaatatacacgacaattctttacagagtttaatttcagcactacatgatgatgaagttgttgataaagatatgttggatttatttgaaagtcattttaaaaatttagaagaagagtaattatatcaggataaaactctaagaatttaattaatctatggctgaaaaccataaatggtattatttaatcagctactcactattcataaagtaatattaaataggttctctaattagtaaaatacctaaaataattggaatagggagtatcaagttaaatgataccacttatttaaataagaaatgatttttaaaatttaaaataattttataacttgtcaatattcattaatctaaagtattatttctatttaaccatatcaaaatatattttactatttttaattattacaatataaacctgtcttttgttattataggtaaactaaaagtaagaaatgatttttatatttttaaactttattattggtaacttatctgtaaatattttaaaatgtactatagaaagttgttaaaaatattaaataattatattaaatttaagtgtgttttttatgctataattagtatgtattttttatgatatattttataaaaaatataatttaatcatttttgaggatattattatgttagatgcatttataacaattgtttcttctattatagaaatatggtcatgtaaaaaagtttttgattatactagtcagtcaaagaccgacttaaaaaaactaaatatgtattttctcttttctgtttttcttattatttcttctttatatataaatataggagctaatagtagaatcttgatatgtatatttgtaatgttcgttttctataagtctaactataaggttaatatatataaatgtctggtaatctcatttttttattggttaatattaataggtataaatggattaagtatgttattagtagcaacagtaagcaatttggataatatgaatgttttacttagtggcagtttatatagatatgaagcaatattcttgggaaagataatgttaggtatattactttatgtttataaggcttcttttaaaaattttaaaataagtaaaaaagagatatacatatgtattcctatgatagcaaatttattgtcattttttgtactttatgattatattattaatcttgtaaaaatctctcctgaaagaagaactgcttttttagtaatagttttactattaatattatctaacatttcaatctttgtattaatacatataatacttaagattaaaattaggaaaataagataaattttaatacgattcatttaaattaaaagttaataattacttttttatgtataattttacatgaatttctataaaagttattttattaaagatagatatacttatatatacggatatgattaaaaaaagtctttttaactttaaaaattaatgttaaaaaataaacttatacattaatattaataataattatttaaatatcttaagtaaatcagtcttacatatatttccgatagattatattgataaaaaacactaaaattaaattaataaaagtacttggagggatggaaatgaaagaggaaaattttattaatgttgaatacgaggataaacgtttttcaattaatagtaaagaagttttgtacatagaaaagcaagagtatgaagtaaagatttatactgaaagtggtaattatgaagttggagaaaatgctccttgtataagaaaactattgaaagaagaaaattttttcaaatgcagtaatagttatattgtaaatctagacaagtgtgaattttatctcagcaataattgtatttttgtgaataataattttataagaattttaggttcagaaagaaaaaagaaattaaaaaagaaattagaaaaattatatgattatgaagattaatattgggaggctgtattttatacagcctctttatttattgattgtattattaataaattttaaattatgataaaatataaaacaagtaacttatttcagaataaaatactttttaaaagaaagggacgagatatgggagattataataaaatgattgaattaaagaataacttaggtatcagtgaaagaaagttaaaatatccttgtatctataaacattttaaagggaaatattatgctacaatgggtcttagcaaggctattgatgatatagaaaacatatgtgaaatatatggtaaagaaaatttaatccaaaacagaaataaatataaattagttattagacatactgaaagagaagaagatatctatgtttatagggatttagatggaaacctttatcataaaaaagaagaagatactaatgatttagttttatacaagaccttatatgatgatacaggaatatttgcaagacctttggatatgtttttagaaaaagtagatacagataagtatgtcaattcaattcaagaatacagatttgaagaagtatataaataatataagagaaatatgtttataaatttagaaaaattctttaacagtacaataatttgcagaaatacaaatgagatttattgtaaataatatgttagattagattataaaatagaaacaaagtaaagtattatatgatataattaagttttgagaagtgataatttatatttaataaaaaataggcatatattaggaggacatatgggaaatactttttatatagtaagacatggacaaacggattggaatatattgggaaaaacacaaggtcatggtaattctgaccttacgcctcaaggtatagaacaggcaaaagaactttctgaagatattggcaagtattcaattgattatatttttagtagcgaccttgggagagcaatgcaaacagctcaaattttaggagataagctcaatattgaagttcaaaaaactgaggcacttagagaaatgggattcggagtttgggaaggccttttaataaaagaaattcaaaaagattattcagatatatatgcaacatggagaaatgaaccacacttagtaaatataccagaaggcgaaactcttaagattataaaggaaagagtagatgcttttataaaggaactaaatgaaaaatatgataataaaaatataattcttgttacacattcaattacattgagggttatgttgttgtcatttttagaatcaggtatggaaaatatatatagaattaagcaagataatactgctttaaatatagtagaatttaaagattatggacctgttatagtaaaaatgaatgatacaagtcatataaaaaatcatgtaaagataaataattctgcactggagtaggaatcaattataaggagaaatttatgagtaaagttatagtagttggtggaggagcttctggaatgatggcagctttgtcagcttcaaaaaacaataatgaagtaatattagttgagagaaatggagaattaggaagaaaacttagggcaactggtggcggtagatgcaattttaccaataatagagagatagaagatttttttgataaagttgtcagtaataaaaaatttctctatagtagtttctatacatttacaaataaagaccttatttcgtattttgaaagtagaaatttggaatataagattgaaaaagaaaatgaccacaaagtatacactaaaaatgataaatctatagaagtaatagaagtattaaataaagatttactcaatcacaatgtaaagataatgtataataagaaagttatagatattataactgaagaaattgctctaaaagatgattctaataaggacaagtcaaagtatctaataaaagggattattttagataatggagataagatactaggagacaaggttattatatcaactggaggagtgagttattcaaagacgggttcagatggttcaatgtataagattcttaaaaagcatggacatacattaaacaaactatatcctgctttagttccacttacaatagaggaaaaatggattaaagatttacaaggaatatccatgaagaatgtggaaatatcttgtaagattaagaaaaggaaaatatcaaaatctggagacatgctatttgcccattttgggataacaggaccttgtgttcttataatgtcttcttatattaacaagattattgaaaaggaaaaggtagaattaaatatagatttcttaccaaatttaagtactgatgaaatctctagtataatcagagcatttccaaataaaaatgttctaaataatcttaagcaaatactacctcaaaatttcttaagagagattttttctctattatctttagttgataaaaaggcaagtgatttgtctaaggcagatgaaattagaattattgagtatataaaaaatatgaagctaacttgtaatgggactacaggtataaacactggtatggttacttctggtggtatttcagttaaagaaattaattcttctactatggaatctaaattagttaagaacttattttttacaggtgaagtaattgatatagatgcagaaactggtggatataatttacaaatagcattttcaactggatatcttgcgggtataagtgtataaatataattttttaataattaaatatgaataaatagaggtgtatatatgggtaatttagttatagctgtagatggtccagcaggagctggaaaaagtacaatagccaagatagtagcaaaaaagctaaatataaattatatagatacaggtgctatgtacagagcagttacttataagtgtttaaaaagtggtgttgatgtcaataatgaaaaagaagttattcaaatagctgaaaattcggatatagattttaaagataacaatatatatttggacaaagaagttataaatgaagaaataagaacaatagaagtaagcaataatgtttctaatgtagcaaaaataaaagaagtaagacagttgatggttgaagttcaacgaaaaataggaatgaaaagttcagtaatactagatggtagagatataggttcatatgttttcccagatgcagattacaaattctttttagtagctactccagaagaaagaggaaatagacgctataaagaactttgtaataaaggatataatactactttagaagaagtaattgaggatataataagacgagatgaaattgattcaaatagagaatttgcaccattggtaaaagctaatgatgcactagaaatagatactacaggaaaaactatagaagaagttgtagaagaagttgtatctaaaataaatctttagttttttatgcatcataatgaaaataaatgtagtgttgaagggagataaacgtgaatttttatagatttgtaataaatatttttaagggtttttctaaaatattttttaaatatgaagttataggtgcagagaatattccagatagaggaaatatagtaatagcatcaaatcataaatcgaatcttgaccctatattcttggctgctgccatagaaaatagggaaatagctgcaattgcaaagaaagaattgtttaaagtaaagccattgggatttatattaaaaaaattgcatgttatgcctataaatagagaaaaaccagatgtatctacaataaaaactattttaaggtcagttagagatggttatgtattaggaatatttccagagggtactagaataaaaggagattcttttggtaaggctaaggcaggtctttctgtatttacaataaaaagtaaatctaaagttgttccagtatcaataatatctaaatataaactttttagtaaagtaattgtatatattggagaaccaatatcatttgaagaacattttaaggaaaaattgagtaatgatgaccatgaaaggatatcacaagagattttagaagtgataaaacaaaattactttaaatattcaaaataagggggtaaagttatgaacataaaaatagcaaaaaatgctggcttttgttttggagtaaaaagagcaatgaaaatggcatgggatgaagttgaaaaaaatgattctggcatatatgctttaggtcctcttattcataacaagcaagcagtagcaaaatatgaagaaaaaggtcttaagactgtgaatgaaattgatacaataccaaatcatgaaaatatgataataaggtctcatggagttcctgaaaatatatataaggaagccaaagataaaaaattaaaaattgtggatactacatgtccatttgtaaagaaaatacatacagtagtaagtgaatatcataataaaggctatgaaataatagttattggagatatgaagcatccagaagttataggtataaatggatggtgtgaaaattcagctataataataaagaccttagaacaaatggaaaatatggaatttaataactccaaaaaatattgtcttgttgcacagactacaataaatccagagttgtatataagtatagttaataaactatcagataaattagaagaaatagtatttaatgatacaatttgttcagctacaaaaacaagacaagaatcagctaaagagttagctaaagaagttgattgtatgatagttataggaggtaaacacagttcaaatactcaaaagttagtaaaggtttgtgaagacttagtaccaacttttgcaatagagactaaagatgaattggatgtaaatacgcttaaaaaatataaaaatttgggtattacagcaggggcatctacacctaattggataatagaagaagttgtaacattccttgaaaatttataatttgataggtaataaaaataggtggacattgttataatttatcataatatccacctttgatttcatattacatgtggtaaatagataacctaatatcaaaaagtgtgtatcttaagatgaaaaactaagagtataagatgcgcactttttaatattaaaaattcaaaagaaatattgatattgattatcaatagaaaatagaatataatataattgttgcaaaattagtctaggaggtaaattaatggaaatgttgatatccgcttctgaagaggcgtttttacatgtaggttctatgattggattttttattttgttatttggatatattaattataaaactagtggaaattttactaatatcatatcaaaaaacagaaaatttcaacccttaataggtgctttaattggagctataccaggttgtggcggaagtctggcaataatgccattgtatataaatggaaaattaagctttggagcaataattgcaagtttaatagctagtatgggagatgcagcatttgtacttatttcatcaaatattaaaatgtatttttttgtcactatagttagtacaattacaggaataataacgggacaattagtggattactttaaactagaagaaaaattagggttaaaaaaccgtagaaaatcagataaatatgatataagtaaaaataaccctaaagaaaataaagaacaacataatcatgatgaaataattttagacactctagctaaatctcatggaaatacaaatagacttgcatttataataacacatggaaagggatataaattttatataggaattatagtaatcggttttatatttatgtcacttgctcactctggacttaatcttcctataattgagaagttacattcattggaagaagtaatagcagtgattggaatattattttcaataatttatatgtggtgttttaaaaaggtatttaaaaattctaatcaaaaagaggaagaaaataaaaagatttctttgcgagaaatgcttatccattctgttggagaaatatcatttgtaattacatggatttttattgcatatcttatttacgatttgataatattaattttaggtggagatgaatacttagttaaactagtattatcaacaggtgtaataagtgtatttataggtgcaggtcttggacttattccaggttgtgggatacaaattgtgcttatgtcattttatttgaagggaactataccacttggtgcagtgatagccaactctatttctcaagatggagatgcacttttcccacttttagcaatggataaaaaatcttctttatgggctatgattattactactataccagcaatacttgtaggtatgatagtttatgcatttttaggttaaatataattacgaataaagaagtattaaaaaaataataaagcacataaatttatttataagaatagtgaagattaaatataaaaataaaaaattcaatatgaattaaattattgcttaaatattaatgagaacatgggagataatattattcctcatgttctctctatttaattaaaggaattatggaacaaatttcaagtgatactttctatcaaaactcatatataatatatattaataaattaaactataatacgtaatacagccagtatattgatataaaaaacttaggaggagttgtaaaaatgggtaatttaaaaagacagtgtgatgtttcaagtggaagagaaaaagctgacattgtactaaaaaatgggacaatcataaatgtatttacagaagagttaataacaggagatgtagcaatagtaggagacactatcgttggcattggcgattacaagggcaatgtagaaattgattgtagcaataaatatatatcacctggctttattgatgcacatatgcatattgaatctacaatggtaatgccaattgaattatcgaaaaaattattaaaatcaggtacgacaactatcatagccgacccacatgagttggtcaatgtaaaaggagctagtgcaatagattttttattagaatcgacaaaagatataccacttaatgtatatattatggtgccttcatccgtacctgcaacaagttttgaaactaatggagttggtaaatttagtgcaaaagacatggagagttatgtaaataatcctagaattttaggtttaggagaggtaatgtgttttaatgatgttataaattctgaaaatgaaatcttggataaactagagctttttaaaaataaagttgtagatggacatgcacctaatataaatggtaaatcacttcagacatatgtatgtgcaggaatagaaaatgaccatgaatgtataacttttgatgaagtatatgaaaaattgagagcaggattaaaaattttaataagagaaggaagcgcagcaaaaaatttaaagtctatagtaagtggtatgctaaagcataacttgccaattgaagaatttatgttttgcacagatgataagcacttagatgatatagaaaaacaaggtcacataagatggaatataaaatgtgcgattgatttaggtatggaacctgttagggctataaaagttgcaacttataattctgcaaaagcatatgggttaaggaaaattggagcaataggtgcgggttataaggcagatattgttgtattgaatgatttagacaaaatggaagtggatagtgtatataaagatggtaatttggtaaacgaagagatgttttctaattacaattatgagattaaagataaagaattgcttaatacagtcaagtttaagtatattaataaagaaaaaatacagttaaaagtaagtgaaaaaaattatgtaatggagattgtaccttatcaaattttgacaaataaggtatatgaatctttaccatgtgcagatggatattttgttccaaataaagagtattcaaaactttgtgttgttgagagacatagaatgactggaaatgtagcaattgcttcactaaaaggatttggcataaaaaatggagcaattgctactactgtggcccatgattctcataatattatagttgcaggggataatgatgatgatattctagtagctataaattacttaaaggaaatacaaggtggttatgtaattgtatcaaatggaaaagttcttgcacacctaagtcttcaagtagctggattaattagtacttttacagctgaagaagtacaagaaattactgataatatgttggagatagcaagaaaaatgggagttccagagtatgtagacccttttattacactttcttttatggcacttccagttgttccacaaataagacttacagatttaggtctatttgatgttgaggaatttaaatttatatagataatataaaagtaataataaatgaggctttctcaaaatagggataagtctctttttattgttgaaatgatgaaaatatatttgatttcatacaaaaaagagcatctaatgaactaaaaattttatttttagatatccttattttaattaatctatcatttaaccttgttttaagcatagatatcttaataaaactattttcagtctattttagaatataaatacatgaaaattatatatttatgaaactttatacataaaaaataaaatattttatttatatatagatttatagggtaataatataagcatagtataaaattattaataaaaacaaaaggagagatatttatgttgagtataggaacaaaagcaccagaatttacactagaagataaagatggaaataaggtaagtatgtcagattttaaaggcaaaaaagtagtagtatatttttatcctaaagataatacaccaggatgtacacgtcaagcttgtgcttttagaaatgcatatgatggatttaaaaaggaagatatacaagttattgggataagtaaagatagtataaaatcacatcaaaaatttgcagaaaagcatgaacttccttttattttactttctgaccctgacttagttgctataaaagcttttgatgtatggaaagagaaaaaaatgtatggaaaaactgcattgggagttgtacgtgcgacatatattatagatgaaaatggaattattgaaaaagtctttgaaaaagcaaaaccagacacaaatgcacaagagattcttgaatatttggaaaaacaggagtaataagaatttatgattataatgttatcaccagctaaaaatatgaagaatatagaagtatttgatagagatttgagtttgccttgttttatagataacacaaaagaaatagtggaaaatataaagacatttggtatagaagattttaaaaataaaatgaaaattaatgaaaaattagctgtattaaataaaaatagatttgaaagcattaaatttgatagattaggaaaccctgcaatcttaacttatgatggaatacaatataaaaatatagaagcagaaaattttacaaggaaagatgaagagtttgcaaatagctgtattcgaatcataagtggattgtatggtgttgtaaaaccatatgatagtatatatgaatatagattagaaatgcagacaaaattacgagtaggtgagtttaagaatttatacgaatattggggaaatcgtatatataaagaactaatcaaagaaaaaacagctatcattaatctttcatcaaatgaatacagcaagtccatagaaaaatttattaaagatagtgatacatatattacatgtacttttaaagtaaataaaaatggcatattgaaagtggaatctacacaagcaaagaaagctagaggtatgatgacaaaatacattgtaaaaaataggataagagatattgaagaactgaaaaagtttaatttagaaggttataagtataaagaaaacttatctaacaatagtgaatacatatttgtaaaagagtagaagttttgttaaatattaaatggcattgttaaatttaggtaaaatatacttagtgtgtattgaattgaacttgattttaaaatataattattcttaaattaaaaaaagaaaggagtggtcttccaaaatggaaaatcacaaacagatgccttggcattcaagagcaacgcatgaaattttagaaagtctagattcatcagaggaggggctcaccgataccgaggcggaaaaacggcttaaagagaatggcttaaatgaacttagaaaaaaaccacctagaacaactttacaaatgctttggagtcaaattacagatgctatggttatgatactaataggagcagcaatattatctttgatatttggcgaatttacagaagcttttgtaatactaataattgtaacagtaaatgcagttattggaattgttcaagagaaaaaagcagaatcatcattagaagcattaaaaaatatgaactcacctacagctcgtgttatgcgtgatggtgaagaaaatgttattccagcaagtaatcttgtagtaggagatattgtttttttagaagatggagctatggttccagcagaccttcgtttaatagaaacatcaagtttaaaaattcaagaggcttctttaacaggagaatctgttccatcagaaaaagatgcagatacaatcttacctaaagaatgtgtattaggagaccgtagcaatatggcgtatacatcttcaatagtcacatatggtagaggtgtaggtgttgtagtagcaactggtatggatacagaagtgggtaacatagcacatcttttagattcacaagatgattttgatactcctataaaacgtaaacttaatactgttggaaagacattaagtgtcataggtattattgtatgcgttgttatatttgcaataggtgcattttatcagagacctctcttgccaatgtttatgattgcaatttcccttgccatatcaattattccagagggattacctgcaacagctactattgtaatggctttaggcgtacagcgtatggctaaaagaaatgctttaattagaaaattacctgctgttgaaacattaggaggagctacagtaatatgttgtgataaaactggtacattaaccttaaataaaatgactgttacacatattgctgtcaatggagattttgaatctggaaaagtgacatcaatagatactgcatctgaaaaacatccattagtgtataaagagattgtttatgctggtgcactttgtaatgatgcatgtattaatccagataaaacagatgaaatattaggtgacccaacagagggcgcattaatttttatggccaaaaaatttggaatagatcaagaagctcttgaagaagaatatccacgtgtatttgaacagccttttgattcagatagaaaatgtatgacaactgttcataatatagatgaaaagattattgcttatactaaaggagcagtagacgaaattctcgacctatgtactaaaatattaacttcaaaaggtgaaagaaacattaccgaagtggataaaaagaatatacacgaattatgtcttaacatgtctaaagatgcattgcgtgtacttggttttgctaagcgtgagatttcatctataccaaaagaagatagtgaaaatatagaatatgatttgacatttataggtatggttggtatgattgacccaccaagaactgaggtaattgatgcagtaagtacttgtaaagaagcaggtataagaaccataatgataacaggtgaccataaagttactgccacaacaatcgctcatgagttaggaatatggagtgaagaaaatactgtgatatctggtgatgaacttgataattttagtgatgatgaactagatgaagctgttaaaaatactacagtatttgctcgtgtgtccccgtttgataaacttagaattatacaatctctaaaaagaattggagaagtaccagcaatgactggggatggtgtaaatgactctcctgccttaaagtctgctgatattggtatagccatgggtataagtggtacagatgttgcaaaagattcttctgacatgattttaatggacgatagttttacaacaattgcttatgcaataaaagaaggtagacgtgtatatagaaacatacaaaaagttatacaatttttgcttgttggtaatatagcagagatacttacgttgtttgtagcaatattattaaattgggatactccgcttcttgctgttcatattctatgggtaaaccttgcaactgctacgcttccagcccttgctcttggagttgacccaccaagcagaaatataatgaagcaccagccagtgaaatcaaccactttgtttgaaaaaaatcttatacaaagagttgttacccaaggtatatttgtggcaataatgactattttagcatataaaattggtcttaatatagaaaatcattctgtaggtcaaacaatggcattttgtgtattagcattttcacagatgttacgagcatttagtcagcgttcaaatacagattcaatgtttaatagaaataatggtaaaaatccatttcttttaatctcatttttaacttctgcatttttaatagcagtaatactgtttgtacctgtttttagaaatgcttttaacttaacagttttaaataacttagagtggcttataacgattgttttagccataatgtctgtaattcaagtagaggttgggaaaattattaaaagaaaaaaaagaaaaaaatagttgacaaaattaggaaaaatatataagatataaaacatagaaaaattaaataaatcttatccagagaggtggagggactggccctatgaaacccggcaaccagtatatttatatacattggtgctaaatcctgcggcgaaagctgagagatgagtataattaagcttatacagagcctgagttatatactcaggctttatttattttaactctcatctgataaatagtttaattttttttactaaaatctaagggggatacaagaatgtataataaagaaacaatatgtgtgcaaggaaattataaaccaggtaatggagaaccaagagtattacctttatatcaaagtacaacttttaaatatagcagtatagaccaacttgctgaattatttgatttaaaagttgatggacatatatattcaagaataagcaatcctactattcaagcttttgaagaaaaaataagtttactagagggtggagtatcttctgtagctgtatcatcagggcaatctgcaaatatgttggcagttttaaatatatgtaaatcaggagatagtatactttgttcttcaaaagtatatggaggaacattcaatttactaggacctagtcttaaaaaatttggtatagatttaatatcgtttgacttagattcaagtgaagatgagatagtagaacttgcaaaggaaaatactaaggttgtatttgcagaaacacttgcaaatccgactcttgaagtcatagattttgaaaaaatagcaaatgtagctaagagaattaatgttccatttattgttgataattcattagcatctccagtgctttgtaaccctttaaagtatggagcaaatatagttactcattctaccacaaaatatttagatgggcatgcttcaagtgttggaggaattatagtggatggtggaaactttaactgggataatggaaaatttccagaattagttgagccagacccaacatatcatggaataagctatactcaaaaatttggaaatgccgcatatgcaactaaagcaagagttcagttgcttagagactatggaaattgtttaagcccattcaatgcgtatcttactaatttaaatgttgaaacactacatcttagaatggagagacatagtgaaaatgcacttaaaatagctagatttttagaaaaacatgaaaatgtagattggattaattacccaggacttgaagataacaagtattatgagaatgccaaaaagtatttatcaagaggatgtagtggtgttttatcatttggagtaagaggtgggttagaaaatgccaaaaaatttgtggaaaaattacagatagcatctttggttacacatgtttcagatgtaagaacttgtgttatacatccagcttcaactactcatagacaattaacagaagaacaattaattgcatctggagtattgccttcactaataagattatctgttggaatagaaaatgtagaggatttaatagctgatttaaatcaagctttaaatttctaatattctaagagaaagagaagtgaaaagatatggctttaatactaccaaagggattacctgttattaataaattattagatgaaggaatagatgtaatttataaagaagattttaaaaaggaattaaagtatgaagaaaacatagacactaaaatagctatactaaatctaatgcctataaagatagatacagaattagatttactaagaaggatagataaaacaggattcaacgtgtctgttgaatttattaaaatttcaacaagagaaagtaaaagaagttgtaatgaatatgttaaagaattttataaaacatttgatgaagccaaaggagagtattttgatggctttataataacaggagctccagttgaacaaatggagtttgaagaagttgattattggaatgaactagaagaaattatggattattctaagagaaaaactaaatctacattatatatatgttgggcagctcaagcaagtctttacaaatactacaatgtaaaaaaacttccactaagtcaaaaatgttttggagtatttaagcataaggtagataaagatagtaaaatagtagatggatttgaaaatgaattttttgctccacattcaagacatactactgtaaatattgaagctttgaaagagaataaagagttgagcattgtgagtcattctaaagaagctggtccctatataattacaaattcaagagatgtgttcgtaatgggtcatagcgagtatgacaaatacactcttgataaagaatataagagggatataaataaaggagataaaatatctatacctcaaaattactatattaatgatgacccttcagaagagccaactgtaaaatggaaaaaacattcagaattgttgtttagaaattggataaaaaactatttgatacaataaattttaagagtatataaatgttaactaaaaaaatatagaaatttataggtataaagttaatcttaatgatactttataccttattttttttaaatttaaccttataatagtagttttatattttaagaaaatcactttaggtgtatgtagatagaggtggttttaattttatatatggtgcgataatgggagactaaacctttatagtatcaataaatttgtattttaacttttaaaagagattaaaaagggagaaatcagtgtaaaatatatatatcgattttttattaaattttattaaaaatatcctgtataaaattaaatatcaataagataacaaaattccaattgaagttacaatattgtaattgacaataaatacttaatactataatatttaatacattaaacattatagtattaagtatttatttacagtatgcacttcagcctaaatttgaaataaagtattttcgtagggagcgtttgtatggatgagatgagttttaagaaagagctactagagttgactagagatataaatatgaaatttacaactttattaagtgatttttatcagccacttggtattacagcagtgcaagctttgattttatctgagttatgtgaacatggagagaaaaaaataagcgatttagggaagaacttaaacatgacaaatagtaatgtatcagtaatctgtcaaaggcttgaaaaaaatggctttttaaatcgcataagagatatagaagaccaacgaattgtaaaagtaaaagttacaaataaatcattggatatacaagaacatatttcaagtagtatttttgatagttattttgaaaatatgaccagtgaaaaattgcaagatatggaagatataatagaaggtttagagaaattaaataaacttttaacttacattgattgcaaataacataaaaataatttaaaggagaataaaattatggatgaacataaaccccaaaaaaggtcagcactctattattatacagttataataatagtagtaatgtttttaaatgctttaatatttccaagtttaatggataaaaaaatggttgagattgactatggaaagtttctcacaatgttggatacaggaaaggttaaatctgttgagatagaaaataatagaatagcaataaatccatctagtagcaaggataagaatatatacataactggtagaatggatgacccagaattggtagatagactaaaaaatgcaaaagtagaatttactaaggttattcctaaggaaaattcacctcttttaagtattttacttacatggataatacctataggtattcttatgctatttggtaacttaatgatgaagtctatgcaaaagcgaatgggtggtaatgctatgcaatttggaaaaagcaacgccaaaatgtatgtatctgctcaaagtggaaaaagatttaatgatgtagctggtcaagatgaggcaaaagaagctttaactgaaatagtagatttcttacacaatccagaaaagtataaaaagataggagcacaaatgcctaaaggagcacttttagtaggacctccaggtacaggaaaaacactccttgcaaaagctgtagcaggtgaagcaaatgtaccatttttctcaatatctggttctgagtttgttgagatgtttgtaggaatgggagcttctaggattcgtgatttatttaaacaagcaaaagaaaaagctccatgtatagtgtttatagatgagattgatactattggtaaaaagcgtgataatggaagtggattaggtggaaatgatgaacgtgaacaaactttaaatcagttgttaagtgagatggatggttttgatggtggaattggagtagtaatacttgctgctacaaatagacctgacagtcttgacaaagcattacttcgtccaggaagatttgatagacgtataccagttgaacttccagaccttggaggacgtgaagctatattaaaggtacatgctcaaaatgtaaatgtaagctcagatatagattataatgcaattgcaaggtctacatcaggagcatcaggtgcagaacttgcaaatattgtaaacgaagcagcacttttagcagttaagtctggcagagatatagtagaacaacaggattttgatgaatctgttgaaactgtaattgctgggtatcaacgtaaaggagctgtaatttcagataaggaaaagaaaattatagcatatcatgaaataggtcatgcacttgttgctgctatgcaaaaacattctgcacctgtccataagattactataatacctagaacttcaggagcattgggatatactatgcaagttgctgaagatgagagtgtacttatgtctaaagaagaagcaattgataaaataactacttttacaggtggtcgtgctgctgaagaggttatctttaacacttgtacatcaggagcatcaaatgatatagaacaagctactaaaattgcaagagctatggttactcgccttggtatgagtgaagagtttgatatggtcgctcttgaaactgtaagcaatcaatatttaggaggagatacttctcttgcttgttcttccgacactgctgctaaaatagatgaagaggtatttaaaatagtaaaggcttgtcacaaaaatgcaattgaaatcttagaaaataatattgataaattgcatgaacttgctaattatttattagaaaaagaaactattacaggtgatgagtttatggaaatacttaacttaaactaaaatgattatacacaagataaaaatgcctattgttaggcatttttattttacaactaaattttttaaattcatatttaaatctttacataatcttaatcattaaaaatacatcttaactacaattttatatcggaattgatattataatagtaatgaatggtgtaaggaggttttttaatggatagacctaatcctgatattctattagaaaaaattaaaaatgaagaagaaaaactaagtagaggtcaattaaaaatattctttggttatgcagctggagtaggaaaaacctactctatgttggaatctgcacaaaatttaaaaaaagtgggtgtagatgtagtagttggatatattgaaccacacactagaccagaaacattggctctacttgatggcttggaaattcttcctgtaaaggagatagaatataaatctataaaactaaaagaatttgatttagatgctgctttagcaagaaaaccagaagttatattagtagatgaatttgcccattctaatgttgctgggttaaggcatacaaaaagatggcaagatatagaagaattgctgttagcaggcataaatgtctacactactgtaaatgtacaacatttagaaagtctaaatgacattgttgaggtaattacaaacgtatcagttaaagagactataccagataagtttttggatacaaatacacagttagaacttatagatgttgaacctgatgtacttcttgaaaggttcaatgaaggtaagatatataagaaagaacaagctactagagcaaaaaataatttttttataaaagataacctggttgcacttagagaaatcgcacttagaaaaacagcagagagagttaataaagaagttcaaatgaccagactatcaaagggtgatgtaactgtaatacctacatcagatacacttcttgcatgtataagtccatctccatcttcagcaaaagttattagaactgcatccagaatatcagacagtacatttgcaaaatggatagctttatatgttgaaactccaaacacagcaagacttccatttgatgaacaaaaacaactacaaaataacctaaaattagctaagaaattaggtggagaaataattgttttacatggtgaaaatataatagagcaaatacttagaattgcaaaactgagaaatgtaacaaaaattgtaataggtagaaatcattcaagtaataaaagatttagtaaaagatttaaaaaagatatagttgacaaattaattgatgaagttgattatatagatatacatataattccatataaatttgcctcagatgttaaatacaaacctaaaaaggataaatcatcaataaaatctaaatttaaaattagcaaagttgattttataaaacttatatttattactttgatgataagtattttagcatatgcagtacaaagcatgggatttataagagaaaatatattgttaatatatatgttgggtgtagttttagtttctatgtggactaaagggtatagtacaggtataataagttctgtatttaatatagttcttttaaattatttttttacagcaccattatatacattatctatagcagattcaaactatatagtaacactggttgtattctcaatagtaggtataataactagcactcttacgtctaagatacagcatgaagcagaaactgctgctaaaagagaagaaaatacaaaaatgatatatcaaataattaagggatttttaagattatcaagtaaagatgatatagtaaacaaaggtatagaacttttgtctcttagcttaagtagagatgtaatttgttatttaaatgtagataagcataataaatcaaaactttacaaaaaaaatactaataataaggataaaaatgatttggatagtgaagatgaaaaagctgttgcaagttgggttttatccaattcaacagtggcaggaaatgacacggatacacttcctggttcaaagggatactatataccaattgtaggaatgaatttaactttaggagtagtaggaatatcatgtattgattcaaaattggatacagaagatataagcttaattgaaacaataattgctcaaatggcaatagcgcttgatagagaaatcttgtcagaagctaaagaaaataccaatcttgagattgaaagggaaagattaagaagtaatcttttaagagcagtttcgcatgaccttagaactccactagcaggaatatctggtgcagtaagtacaattataaaaaacaagggtactataggtcaagatataatagatgaattacttagtggtgtatatgaagatactcagtggttaataagacttgttgaaaatttacttagtatgaccaagatagatgaagggaaattggaagttaaaaaacattctgaactggttgaggaaattatatcagaagcgttacaaaaaataaaaaaaagaattgaaaatgcacttatagatattaatataccagaacagatattatttgttcctatggatgcaaaattaatagaacaagttttaattaatttaatagataattctttgaaatattcaaaggaagattgtaagatagagataaatgtatacgagaaagatgattatgtttggtttgaagtatctgataatggtcctggtatatcaaaggaacttaaaaagcatatctttgacagattttttactggagaagaaggagctaaagattccagaaagggtgttggacttggattatcaatttgtaaatctataattcaagctcataaaggtgaaattatggtagaaaacaataaagataagggttcaacttttaagtttagtttgcctaaggaaaatgaatagttttaaattttaaaattagttttggaggaagaaatgagtaaaaaacttatattgttagtagaggatgataagacaataagaaaatttatatctactgcacttttaacacaggattatgatgtcaaggaggctataactggaaaagaaggtatatctattgctgtctcatattctccagatgttgttcttttagatttaggcttagaagatatggatggaatagaggtaataaaagctatcagacaattttcaaatataccaataattgtagtttcagctagagagcaagatagagataaggtagaagtatttgatgcaggggcagatgattacttaacaaaaccattctccatagtagagttattagcaagagtaagagtcgcatttagacattcacaagtagaagctcaacaaaaagatgatgttaaatctacgtttgaagtagataaattattgattgattttgataaaagaaaagttattgttgatgatgttgaagtccatttgacacctattgaatataatattctttcattacttgcaaagcatcatggaaaagtgcttactcataattttataataaaagaaatatggggtagtgttatagggaatgagactaagtctttaagggtctttatggcaacattaagacgaaaaatagaaaaacaacctgcaaacccaagatatataattacagaagttggtgtaggatacagattaaatgatgaatagttgtaatatattaattattagattatgtgcttattaatatatattaaaattatatagtttagttaaaataagaatgaagtgtatgtgcttgttgtcagtttagcacatgcattttattttttagctttttagtatcaataatatgaaatatgttttaaaataagtatatagtgtaatctgtaataaaaactttggttaaataataaatgtatttaacacttaccttataataaatttaatgtaaatattaaataataattgttaaaatagtgtaaaataattacagtaaggattataaaaaatttttagaatgtaaattgaaatttaggagtagatgtatgtatatactgaatttaaatacaagagagactattgaagattttagagataaattttatgtagcagaaaattcttatcttatattaagtgctccaaaaaatttaaaattgcttaaggaaactttggatatagatgaaataacttttaatgattgtcttaaatttgatgaaataaccaaacttgatttatttgataattacgattttttaagcctaaatacatttgaactaagagatggagaagctgttatagaagaagtaaatatgtatttatcagataattttatattggttgtagtgaatgaagaacactttttatttgaatttgtaaaaaatattattttgaagaactctcaacttgaaaaaaatccagttattaatctatttaagataaactacttgattcttagagaagttataaaaaatggttttgagtctttggaaaaagttgaagagttaattcttcaaatagaagatgaaatgatggacaacattaataagaatcatgtatctagaataagtgatgtaagaggattaacaagaattatagttaagaatactagacctcttttgtatattggggatagaatagttaaggaaaatataagatatttaaaatattcaaatgtaaaaaaatataatttagaaaattttcaaggtatagattttggaattgacaaattatacaatttcgcattgtcaacacgagagttagcagataaattattagatatttattcttccagagtaggtgagaaaacaaataacttaattacaaaattaaccttgttaacagccatatcagcaccacttacaattataactggtatatatggaatgaactttagatatatgccagaattaaactggatttatggatatccagcaactttattttttatgctatgtataatttttattggaattataatatttaaaataaaaaaattattgtaaattacagatgatgtttaattgattttataaaaatacatcaattgagaagctgatttaagtaaataaaaaaatattttaaattgaaaatatttatagaaaatattgacaattatattttctttgttataattattaaacaagaagaataataaattataaaaatggaggataatactatgaaaggaatattaaaagaactaacagcaaaactttatagctttttttactttatgttctggggcttttattttagcgctggctatttcttttacaaaaatatatgtacttcctttctggtgaggccttattttagtgattttgagcataagtaaattttataaaaatgattattttatatatttatataagatttagtgcttgatagattattttagagaactcattagtgagttctcttttttattttaaatataaaattataatattgggaggtagtaaaaatgatagtagtattaaaaatgggagcagataaaaatgaagttaaaaaattaattgaggctattgggagagaaggagtagaagttaatcccatagatggaacagaattaactgttttaggtttagttggagatactagtaaaatagatgccaaaagaatagaagcaaataagatagttgaaaaagttatgcatgtagtagagccttttaaaaaggccaatagaaaatttcatccagaaccttcaatcataaatgttaatggaatggaaattggttcaaagaaaattgctatgatagctgggccttgttctgttgaaacagaagaccaaatagtatctatagctaaagatgtgaaaaaatcaggtgcaggatttttgagaggtggagcattcaaaccaagaacatcaccatacgctttccaaggattgaaatatgatggattggatttattaaaaaaagcaaaagaaaaaacagggcttcctatagttacagaaataatgtcaacacaagatatagatatatttgaagaaaatgtagatgtaattcaagttggagctagaaacatgcagaactttgatttattaaaagaattaggtaaaacaaataaaacaatacttttaaaaagaggattatctgctacaattgaagagtggctaatgtcagcagagtatataatggctggaggaaatgaaaatgtagttctttgtgaaagaggtataagaacttttgaaacatatactagaaatactttggatttaagtgcaattttagctgtgaagaaacttagtcatttaccagttatagttgacccaagtcatgcagcaggtaaatcatggatggttgactctttatctaaggcagcaattgcagttggagcagatggtctaataatagaagttcataatgacccagcacatgcactttgtgatggaaaacaatcgattaagccaaatgaatatgatgaattgataagtgaattaaagactatcgcatcagcagttggtagagaaatataatctataaaaggatggttaaacgtggaagaaaaactattagtaaatttaaaagaaaatagctacaatatatttattaaaaaaaatatactaaagaatataggagaagaaataaaaaaaatatattttggaaataagatttttattgtaactgatgaaaatatagcaaaattatacttggataaagtaaaaaataatttaagtgaatctggatttgaaattaaatctttaatattaaaatctggtgaagaaacaaaatcatttaatactcttcctaaaatatacgatagtttacttgactttaagttaactagaaaagatttgattattactttaggaggaggggtaataggtgatttaggtggatttgcagcagcaacttttttaagaggtataagttttattcaaattccaacatctttattagcacaagttgatagttctgtaggtggaaaagttggagttgaccttgagagaggcaaaaatttagtgggaagcttttaccaaccaaaagctgtgtttatcgacccaaatgtattattatcacttccagaaaaattctatagagatggaatggcagaagttataaaatatggatgtataaaagacaaaacttttttcaataaacttttaagtttaaaaaatagagaagaagtaatgcaacatatagaatacattatacataaatgttgctttattaaaaaaactgtagttgaagctgatgaaaaagactttggagatagaatgcttctaaactttggccatacattaggtcatgctattgagaaatactacaattttacgggttatacccatggagaagctgttgccataggaatgtataagataactttagaaagtgaaaagataggaattacaaaaaaaggtacatcagaacttataaaatcaattttaatgaattataatttgccttatgagattgaattaagagataataaatctatagtagatgctatatctcttgataaaaaaaatctaggtgatacattaaaaataatacttttaaaagatattggagagagtattatatataatactacttctaaattttttcaggaggtaagataatgggaagtctaaaaatatatccaagtaaattatctggagatgtaaaaataccaccatcaaaaagtatggcacatagggcagttatttgttcatctctaagcaatggaaaaagtagaatttctaatatagatttttctgatgatataatagctactataagagcaatgacatcattaggagctattatagaaaagaaagaagatattttagaaatttcgggaattttttctaaagaaggtattttaaatagagagaatcagttgaatcaacctaaattgacaatagattgtaatgaatcaggctctacattaagatttttagtacctatatctttagcatttgatggtgtaaaaaggtttataggtagaggtaatcttggaaaaagaccacttgatacttattatgagatatttgacagacagaatataaaatatagttacaaagaaaatcagttagatttgattatatcaggtaagcttaaaccagatgaatttagagtaaaaggaaatataagttctcagtttatcacaggtctattgtttatattgcctacactagagagtgattcaaagataataattactactgagctagaatctaaaggatatttagatttaactctttcaacgataaaagattttggggtagaaattataaacaataactataaagaatttattataaaaggaaatcaaacgtataaagcgagagattataaagtagaaggagattattctcaaggagcattttatttatcagcagatgctataggagaagatattagcatattagaccttaaagaagattctcttcaaggggatagtgaagtagttgaaattttatctaggatgggaatggaaatattaagagaaggcaacaaaataaaaggaataacaaatggtttaaatagtactttgatagatgcatctcaatgcccagatataatacctgtattatctgtagtagcatccttaagtatagggaggactacaataattaatgctggtaggcttagaattaaagaatgtgatagacttcatgcaataaatgttgagttaagtaaacttggagcaaatatagaggagaaagaggatagtttgataatcgaaggagtaagcaagttaaatggtggagtagaggtgtggagtcacaaagaccatagaattgctatgacacttgcaattgcttcttgtagatgtgataaaccaataatattaaaagattttgagtgtgtatcaaaatcttatccacatttttttaaagattttaagatgttaggaggtcgaattgatgagtggaatatggggaaataatttaaaagtatcaatttttggagaatctcatggaaatgctataggtataaatatagatggtcttccttcggggattgaacttgaccttgataagattgataaagaaatgaagagaagagcacctggaaaaaattctatatctacttcaagaaatgaaagtgatataccagaaattctaagtggatattttaatggaagaactacaggaacgccattatgtgcaatcataagaaatagtgatactcgttcaaaagattatggagagcttaaaaatttaatgagaccaggacatgcagatttcacaggtaatgtgagatattctggatttaatgactatagagggggaggtcatttttcaggtaggataacagctccattagtattttgtggggctatatgtaaacaaattttatcacaaaaaggaatagagataggagcacacataaaaaaaattaaaaatatagaagatatgagttttgattatgtaaatatttcaaaacaacagttatcaaatttgcaaactttggaactacctttacttgatttatcaaaggaagaagccatgaaaaatacgattatagatgcaaaaaatcaaagagattcagttggtggtataattgagtgtgcagtagtaggtattaatgtagggcttggaaatccattttttgactctgttgaatctactttatcacatttattgttttctgttcctgccgtaaaaggtgtagagtttggtttaggttttgaacttgcagatatgtatggctctcaaagtaatgatgaaatgtattatgaaggaaatcaagttaagagcaaaacaaataacaatggagggattataggagggattactactggaatgccaataattttcaaagtggcaattaagccaactccttcaattagcagacaacaaaacacagttaatataaaagataaaaaggacgatattttatatattaaaggcagacatgacccttgtatagttcaaagggctatacctgtaatagaagcagtaacagccattggaatttttgatttgatgaaaggacgataataatggaggatttaacgagatatagaaatgagattgacaatatagataaagagattattcaattatttgaaaagagaatgaatacagttcttgaaattgccagacataaaatgaaaaataacactactatacttcaaaaagatagagaagaaaaagtactaagtagagccatagataatttagataataaagcatactcacaagaaacggtacagttttttaattctataatggaaattagtagaggattacaaaaaagattgatagataatgatggtgagcagaaaatcgagtttagtttagattcatcaaataagaaatttgatttgtcaaatgtaaataaatataagtctttaaaagatgaattaaataaaaaaaatatcctagtaggatttccaggaaaatcaggttcatttacagaagaagcactaaataaattcttcaacaaaacaatatcaaaaaaacaatttaaagaatttgaagatgttttcatagcacttaaaaataaagaaataaactatggaataatccccatagaaaattcatctacaggagctatctctgaaacttatgaccttttgagaaagtacggtttttatatagttggagaagaatgtataaaaatagaccaaaatttaatagggataaaagacacaaaacttgaagatataaaagaaatatattctcatccacaaggtataggacaatgtagtgaatttttaaaacaaaatagtacatggaaattgataccatttaataacacagcaacaagtgcagaacttgtaagaaaacttcaagataaaacaaaagcagcaattgcaagcaaaaaagctgcaagtatttatgaattagaaataataagtccttgtataaatgatattgcaaacaactatacaagatttgtagtaatcagtaatcaaatacacattgaagaagaatcaaacaaaatgagtgtagtattttctgttgaacatgaagcaggaaaactttataaagtacttggatactttgctgaaaataatataaatatgacaaaaatagagtcaagacctatgaaaaatgcctcatggagatatttcttttatatagattttgagtgttctatatacaattctaaagtgtacgacttattagaattgatagaacataatacagcatattttaaatttatgggagtatataaaaataaaactgaatagataatataaatttttatttaatttataattattaggaggtgtaagtatgaattttttcggtctagtaggtgaaaaactctctcacagtgtttcacctcaaatccacaagagaatattcgagatattgaatattgaaagtgcttataaaaactttgaaattccaaaagaagatatatctaagctagacggtgctataaaattattaggaatacaaggagtaaatgttactgtaccatataaggagcgtattatgaaatatcttgattttatatcaccagaggcaaaacgtataggagcagttaatacaattttactcagagaaaatatgttatatggttacaatacagattactttggtcttgatagtatgtttaaaatggctaatattgatgttcaaggaaaagtagcagttatattaggaactggaggtgcttctaaagctgctcttacatattttattgattctggtatagaaaagctttatgtttcaactagaaaaaaggatgataaaaaattattaaatagtaaagctatattaatagattatgaagaacttaaacatataaaaggagatataatattaaatgctacaccagtaggtatgtaccctaatgtaggaatttcaccagtgtcaaaatctattatacaaaattttgatatattaatagatttaatttacaatcctggagaaacagagtttttaagaattggtaatagtatgggtaaaaaaacttgtgatggattatatatgctggtagggcaagcaataaaatctcaggaaatttggcaagatactaaaatagataatagtattttagatgttatatataatgaactaaaattagaatttttgtaagggagattgtcatgataaataaaacaaaagaaaaattgatattaataggtatgccaggtagtggaaaaactacaattggtaaacttttggccaaagaatataattgtagtttctgtgatatggatgattatataattcaaatatctcaaaaaagtatagcagagttgttttcagaaggagaagatatctttaggaactatgagactcaagcatgtagagaactttctataagtgataaaacagtgatatctacaggtggaggtgtaataaaaaaggatgttaatatggaaatactaaaagaaacaggtataataatttttattgatagacctatacaaaagattttggaagatataaatattaattcaagaccattattaaaaaacggaaaagatagattgtataatctttataatgagagaataaatctttataaaaaattttcagatatagagattttaaatgataaatcattaaataatgctgtatataatattacaaatgcagtcagtgaaaattttaaatttgactttaaagaaaaataatctagggggaaataaaaataatgaatattgttattgtaggactaggagttataggaggctcttttgctaaagcattaaaaaaagctggatatgaaaatgtatttggagtagatgtagatttagaaactttaaaaaaagcagaaaaagcaaaaatcataaaaaaaggatgtactacaggtaaagagttatttaaaaaagctgatttaattatactatctatatatcctagattagttgtagattttctaaataataataaaaacttttttaaaaaagggactataattactgatactacaggaataaaagaaacacttatcaatgatgtgttgcaaattattccagatgatatagattttatatttggacatccaatggcaggtagggaaaaaaagggtattgattttgcaagtgaacaagtttttaatggcgcaaattatataattactccaactggcagaaacaacataaaaaatttagagttagttgaaaatttaattttagagattggatttaaaagagtaaaaaagttaacttcacaaaaacatgatgagattatagcttttacttctcagttacctcatgttatggcagttgctcttataaatagtgatgaagaaggtagagatacaggtaaatttattggagatagttatagagatttaactagaattgcaaatatgaatgaagacttatggagtgaactttttttaggaaatagagataatttactaaaagttatagaaaactttgaatcagaagtaaatttagtaaaagaagctatatttaacaatgataaaaataaattgatagagtattttaaaaaatcatcaataagaagagaagctttagaaaaataaatattaatatttaagctatatatagatgggtataaatgtaagcgatagtgtatttaattgtattaataaatatggattcaatataattaaatatgctattgatatatttgtacccttaactattgttatcttttaaatgataatgatatttatttaaatgctctttattaacaatttataaaacttaattgtaaaaaatacttattaatagtaaaataaagtgaatcaattatattataattgctaaagagagtgaggtgtagctatttgaaaaaaaatagattaataataaagaatatatcaatagcatttatagtactattcttttttagtgtatttacattcttttatataggtaatattagtagagtattagaatatgaaacaaatgacataatgacagttacaattactggatggattatactttcatttttatttttatgtattataatttacatattatattcaaaagcaaagagtcaaaaaactatagaaaaagtagcatatacggattttgtaacaggttattccaactggagaaagtttgaattagatgttacaaatttattaaagaaaacatcacaaaataataaatatgcaatggtcatattcgatattgataaatttaaagcaattaatgatatatatggacataaaaagggcaatttaatattaaaagatattgcagatactttaaatgaattgactaatatcaatgaaacttttgctcgtgtaagtgctgataattttaatatattattaacatataacaaaaaagaggatataataaatattattaaaaaaattatagcaaataatgaacttgtaaacttatcttttggaatttatgaaatcaaagataaggatttatctgtaagtgtatatagtgatagagcttcacttgcaaaatcatcaataaaaaataatagtgatgtaaattttgcattttttaatgataaattaagagagaaattattacttgaagataagatagaaaaagaaatggaatatgctcttgaaagtgggcaattcgtaatgtatttacaaccaaaatataatattaaattagataaattttgtggaagtgaagccctagtcagatggcaatatacagaaaaagaagtcatatatccaggtgattttattcctatatttgaaaaaaatggatttattagaaaaattgatatgtacatattagaacaagcttgtaaagaaatccggtctttatttgataaaggaatttcacctttacctatatctgtaaacttctcaagagttgattttttaaaaaaagattttattgaaaacatagtaaatatatgtgatagatataaaataccatatagtttaatagaaattgaaattactgaatctagtatgtttggagatactgatactctatttaatgttagtagaaacctacaggatattggttttatagttgcaatggatgattttggctcgggatattcttctgtaaatatgcttaaaaatataccattaaatgtaataaaattagatagaggattttttgttgatgataaagatgttgataagagtcaaattgttataaaaagcatagtttctctcattaagcaattaggaataagggttgttgctgaaggaattgaaacaagaagtcaaatagaaatgttaaaaaaagcaaattgtgatattgttcaaggatattatttttcaaaaccattaccaattaaagaatttgaaaaattagtctataaaatatagtcagcgagtcttaaatgggaggtggtgattaagtgataagagcaaaatcgttaaaaaatgtactgagtattgttttaatatttttatttacaataatttctttttctgattttgcatttaaaactaatgtccaggaagaagaaaatagtaaaattaatttaagggaaatatccctacaaagttccaatgctataaaaataaaattagatagttctctatcctttattaaaagtgtggcaaatatggtttcttattttaatactatagataactcaaaaatagttccattattagctaacatatcaaaagaatctgactttcaaagaatctctattgtatctcctgatggaataagtcataccagcgatggcaaaattatcaatgtgtcaaaatatcagtattttaagaaagctattaaaggagaaagcaatatatctgaagttgtgaaatctccaattgatggaaaagatacttttgttatagctactcctatatttaataagaataacaaaataattggtgttttatacggttcttactacaatgataaattagctgaatttatagatataacaagttttaatagtgaagggtacatagatatatttgaatctagtggtcaatttgttttaaaatcttcacatacaaacaaactgattaagtcaagtagtaacatatatgatatatttaaaaaagcttcttttgatgatggttatagctataaaaaaatatatgaagatacaaaaaataacaagagtggctttacctcatatgaatacaaaggagaaaatcgttatgctacttatacacccattggtgtaaatgactggtatgtaatttctgtgataccacaatatactgtaagaagaaacattgataaaataaatcaattagcattttctcttattttcaaagtattcttattgtttattatgcttataatatatattatttataaaaacaataaatctcagaaagatatactaaaagctaacaaagaaatctcatctattacaaatagcattcctggaggagtacaaaagtgtaccctgggtgaaacatgcaatattaattttttaagtgatggatttatagagttgtttggttatacaagagaagaaataaaaacattgtttaataatgatttttatagtttaatacataaagatgatgttgaaagaataaaaaaagaaatttctaaacaactttacaaaaataaaactattgaattagaatataggattataacaaaaaatggtaatacagtatgggttttagataaaggagaacttataacagaacctgatggaaaagaatatttttgttgtgtaactgtagatattactagaacaaaacaattagaacaagagatggaacaaaaaaatctagaacttgaaatgatatcagaaaatattttaggtggtataattataacagaatttaatgatgattttactataaaatacactaactctggttatctttcaatgattggatatacacgtgaacaattagaaaatgaacttaaatacaaagcttgtaatcttgttttttatgaagatagaaagaaggctcttgaaagtatacaacatcaattaaacacaaaaggaatagctgtatatcaacatagaataagaagaagagatggtaatattatctgggtttctataaaaggaaggcttattattgatgatgatggtattgaaaaaggtatttggattctaaatgacataacagatttaaaaaatgcagaacaaaaacttaaaataaatgaagaaagatttagaattgcattaaagcaaacatcaaatactatatttgagtatgatataaaaacaaagtcacttttaaatactagtaaagagcttgataaatataatatttataaaattactaaaaacgttccatattctctagtagaatcaggagttattcataaagattttagtgatgattttataaacatgtatgaaaatgtaataaatggagcaaaaaaagcaagttgtgtagttaagatgaaacttccagatgaaaattatatatggaataaagttaccttgactactatttttgatgaagatggtaatcctgtaagagcaattggtatacaggaagatataagcaaacaaaaggaagcagagataagatataatcaagaaggtaagtatcattcagctatattgtcggaagcaatgataacctatgaaataaatgtatcaaaagatacttttatcaaaggaaatgaaagttggcaaaaaccatttggaattaagcctgacaataattattctgaaatggtaaaaactatatcaaacagtattattcacaaagacaataaagaggtgtttttaaatacatttttgtgtaaaaatttattatctgcatataacaaaaatataactgaaataaaattagaatatcgaagaatgaatcaagaaaataaaatgatttgggtcatttgcacaatgcacttaataaaagattctattacgaatgatataaaagcacttgcttatgttaaagatattgacaagcaaaaaaatgaagaaattaaattaaaattaaaagctgaaagagatactcttacaggattatataataaaggtactacagaaaatttgattaatgatttcttgaactctgacgaagcaagcttaggaatgcatgcatttttaattgttgatatagataattttaaatctgtaaatgataatttaggacatgtatttggagataaagtattatttgaagtttctaaacacctaaaacctatatttagaaaagatgatatagtaggtcgaattggtggagatgaatttatagtattcttaaaaaatattcagtcttttgagaataccaaaaagaaagcagaaaaaatatgcgatatatttagaaattcttatacggaaaataaaaagacatataaaatatctggaacagttggaatttcatttgtaccagaacatggaactgtatttgaagaactttataaaaaagcagacatagcactttattatgcaaagagcaaaggaaaagataagtatgcactttataataattgtatctaccaaaatgaacttgaaaataatataagtgataataatataaaattagcaaataaatgtgagaaatccaaaccagtacttaaagaaattcttgattctattgataattatatttatatagtgaatccaaatacttatgaacttctttttgtcaataataaggtgtctcgtttggatttagagataaaattaggagaaacctgttataaatcactattaaaatctgagagaccatgtaataattgccctcttaacggattagaagaaaataagcattcaaaattcaaaatagagacaaatacatttggtaaaaatatcagtatagcaagttggattaattgcatagatggagaatacaactgtcttatagagtgtatagattcttctttatacaaaaataaataaaaaaggactatgaagatatgttaaatagtataactttgatacttggtataatatttacaatttactatttttatctcaaaatagtttttggaggaatttcatttagtgagattttcttagttgtaggaattgtactaattatctatcaaatatttaagaaaaaaattaaagaaaagaaggttttttatagggtgttaaaaataataatcagcatttttttaatagtatttgtagttactgagagtttaattattttttatcctaaaaatagtttagaatcaaaaagtgattatctcttaattttaggagcttctgtaaaaaagactacaccaagtacaaccctgaagggtaggttagacactgcattgaaatacctaaaaattaatgataattgttatgtggtagtatctggtggtaaaggaagtggagaaaaaataactgaggcaaaagctatgaaagattatcttataaaaaatagtatagataaaaataggataatagaagaggataaatccacgaatacttatgagaattttaaatattcaaaattgaagatagaagaacatagtcaaagaaaactaagtgatttaaaagtaaaaatagtaacaacagattttcatgttctcagaagtaaaatattagcatatagaaatggatataaaaatacgtctttttatgctagtaaatcaaaactttcatttgtaccaacttactatacaagagaattttttgcattatggaaaacaatcatttttgatagataataaataaaaagactagatataaactcatatctagtcttttctattcccttaattctaatccattttccaactttacttgttgtagaaatttcaacattgggatttacaagtaattgcttataagaagttttatattttacgattccaaaatataattttccttcataatccattataaatccgaatgatcttactcttggtttattatcttcaactgtagcaaaatagaatgttgagttttcttttaaaaaattcattattttttccatgattaaatcctctttgtatcttatactaatataatgaatataaataaaatatttataatactaatataaattgatataaaaacaattacaatattatattgattattcaaaattatatataaaattcagaaaaacatttcagtttacataataaaaataaagtaaactaaaattattgattttagattaaagtgccagattaagtatttaagtagattttaagcttgatttgattagaaaggtacaaactatcaccgaaaaaaattaaacccatttaaaaagcaatataaaagcttgttattttcgagaaaaatagaccctctaaactcaattagataaaaataaaatacaaaaaattatatctctgaatatctcaagtaattaagtttaaattttacgatattttgtttgatgatttataatataaaagcatattcttaatcttctcaaattaaaaagagtaaaaaataacaaaaaaatcactgacatttcactgacaaattgtaattttgttattataaatacattgaaaatacttgattattgaaaaatggcataaaataataccttttatgccatttactattgtttgatagtttttaacttatgacataagatattttttaacatatacaataaaatataaaaaaattgatattgcaaataaaaaaaatacatattagatgttatagaaaaaaagcgcacttataggcttaaaatgtcacataaaagagtttcaaagaataatatattatgaacacaaattttgtaatcacaaaggagtgataatatggcaacagtatcaggacaaatagtttttgatagaaatagaagtgctaccattgattctggggactcaggaatagccaatataccagttgtattacaagatatagcaactggagttagacttgtggttctcacagatgcatcaggaaattatgtttttactaatgttccaaatggtaactatagaattgtagaagcttttggaactacaggaggagtaccaacaccagggaattttgcaacagcgatagtaggtccagttccaattgcagaaatgccacctattagttctgtgacaaatcctcctattggttcaacaaacttagatggtacaacacctaacacactattaataacagtagcaggttcagatataataaatcaaaatatattaaatgggcctgtgatttatacacctatagagaatatattggattcttgcgtgtctgtatctaatataaaccttattacagatgcagataacggaacattcggtttttttccaccaggtacaccaagtaatacaggacctgaaatagaaccttacccaaatgtgacgccagattttacgtatgttgtaccagacccaactaagtttacacctttagatggagaatatacagtacaaaatattatgacaaatgcaatgagtaatgttataggagcttggtggcgtattgctgaccatactacaggaaatgaaacaggaagaatgatggtggtaaatggttttaatcctggagctgtattttttaaatcaacagtacaagttacacctaacactaattatttatttagcacttggattttaaacctttttaaggtaacaggatatccaccaccacagctaggtgtaagaatatttgaccaaaataataatatactatatcaagcaacattaggagctcaaattccagttaatacaaacgcaccagaatggaaagaagtaggtactgtgattaattctcaaaataataatcaacttacagtagaattttttagtgaaggagaaagcgccattggaaatgactatgctatagatgatgtttctttaagagaaatagctgttccaacctttactccaataaaaacaagtaacacagaaactgctaatgtaggtgatataatcacatatacagttacattagataatacttgtgatagccctttaactaatgtattttttagggatttaattccaaatggtttagagtttatacctggaactgtaacggttgagacggtagcgttattgtccaaacttgatgtcgataagcatatagatgttgaaattaagctggatgagcttgatttgacaagtgcagagagcaaagcaacatatgctcaaattaaggagtatgtattagaaaaatttgggctaaaggtttctacactttatattgcacagattaagaagaaatgtggaattgaactgagagagcattataataaatctaaaaaagacaatcaggctatcccacagtgtacgcctgaaaaagaagaagctataatggacgctttaagacattttaaaatgatttagtataaatggagagtatatatgagatggatattaaaaattatcttatttccaattagtatagcgttaagtattctcattgcatttctttcatttttacttggcataggaacagcaatactttacctgttgatgatgttttgcatatttggagcaatagcatcttttttacaaaaagaggttaccatagggatagaagcattgatattaggatttttgttaagcccatacggaataccaatggttggaacagctgttatagccgttttaacgggagtgaaagaagcaatacgctctatttagaaaatgatatttatatatgattttagacgatagaaataactatcgtctttttgtttgaaaaaaagaaaggagtgtttgatgagttatgtatttatttgatgaacaacctatagttgcgaataaaactcttgctagagaaataggattaaacgaagcactcatactacagcagattaattattggatagaaataaataaaaaatcaggaaagaattatcatgatggtaaatactggacatataattcaattcgagcatggcaagaaaatgactttgactatatgagctttgatacagtaaaaagaactttttcaaagttagaaaaagcaggttatcttttagttggaaattacaataaggatccaagagataaaacaaaatggtatacaattaataatgataaacttgaagaattatatatggatatggatttgaaaaaacaaaaaatacaaacagaagcattaaaaaattctatgcccaatgcattagggcaaaatgcaccaatggataagggcaaaatcagccaatgcaataatgcagattgcactaatgcacaggttcaaaatgcactaatgcaaaaggataatttgcaccaaccattaccagagaatacaacaaataatactacaaataatactacaaataattcagcatatatttccatccatccttccatcaaagaaaagaatcaattattttcagagaatatgaagggagggaggatagatataagctataaaaatatatatcaaaattgtttagaagaattgcgacaccaaacaggatattatgaacatatgagtattgggaataagagtgtggctgaagagtttgatgaaatattaaagatactggcagatgtaatggtattagatgatgaatctttcattactatcaaccaaacaaagatatctgtacaagtagtaaaggaaagatttaggaaacttaattcaggacatttagagtacttagtaggagtattaagagaaaatgaatataggattagaaatataagagcttttgtcctgaccgccgcttataatgcaccaagtggaatagatgcctattattcggctcttgtaagctatgatatgagaggaggatattgatgtgatcaatgaagaaatagcaagaaagaccttaaatatggagataaatgctggtaaagttactggaaaagttctattaaacttattaaaaaaattgatgaaagaagcggagaaattcggaggacttgaaaaactggtcaatgccaacggaaatgaagtaaagctaaaagatatggttaaaaagggacagcttgaagaaatcccagtggaagaagctgagcttaaagaacttaaaaaagagttgaatagatacggtgttaaattttcagtgatgaaaaataaagagacaggtaaaaactctgtattctttcaagccaaagatatgaaagtgatggataaagcttttaagcacgctctttcaaaatcagaaaagaaagcagaaaggaaagaatctattcacaagaatattgagaagttcaaagagatggctaaaaactctatttcaaaagagaaaatcaaaaataaacaaaaggagcaaagcctatgatagataagatactaaaagacatcaaaggcttatttaaggtgcaagataaggcaaagtttctaaagcagaacattccctatcttgcatttttctatgttggcaatatcttttctcatcatgtaagagcatatactggtggcgatgtaatagacaaaatatttcaaggtatactggaacttaacaccatgagctttcttccaagcattcatcctacggatattttaatgggagtggtagtagctgttttaatcaaaattatcgtatataccaaagggaaaaatgctaaaaagtttagacaggggaaagagtatggctcagcaagatggggaacgaaaaaagatatagagccatatatggatgaaaagtttcaaaacaatatcctacttacgcaaacagaacgattaaccatgaatggcagaccggcaaatccaaagtatgcaagaaataagaatgtacttgtaatcggtggatcaggaagtggaaaaacgagattttatgtaaaaccgaaccttatgcagatgcactcgtcatattgtgtgaccgatcctaaaggaactatagtccttgagtgcggtaagatgcttgaagataacggatatgagataaaaatcctaaataccattaacttcaaaaagtctatgaaatacaatccctttgcttatcttagaagtgaaaaggacatactcaaattagtacagacaattatcgcaaacaccaagggagagggagaaaaatcaggtgaagatttttgggtgaaagctgagaaactctactatacagcacttattggctatatcttctatgaagctccaagagaagaaaagaactttgcaactctgcttgatatgattgatgcttcagaagtcagagaagataatgaaacctatatgaatccgatagataggctctttgaagcactggagaagaaagaacctacacactttgcagtgaagcaatataaaaagtacaaattggctgcgggtgatatatgctctaagtgacttcttaatcatgattttgtcatggttagtgaagcaatcacttagagcatttttgtttcaggaggtacagccatgagaaatgaaaaaattaccccactgtacgagcgcctgagccgggacgatgagttacagggcgagagcaactccatatccaaccaaaaacagatgttagaggattttgcccgccggaatgggctgcccaaccctacgcactttaccgatgatggtatctcaggcacccgttttgaccgccccggatttttggcgatgatggaggaagtggaggcagggcgtgtagaggcaatcgtcatcaaggacatgagccggttaggacgcgactatctgaaggtcggtcaagttatggaggttttgcggcagcgaggcgttcgtctgattgccatcaacgacggtgtggacagtctgaaaggcgatgacgattttaccccgttccgcaacattatgaatgaattttacgcccgtgataccagtcggaaaatccgatctgtgtttaagtcaaaaggcatgagtggcaagcacctgaccggcactgtgatttacggctacttatgggacgaaaaacgggagcattggctggtagatgaggaagctgccgaagtggtacgccgtatattctccctcacgctggagggatatgggccttaccagatcgcctacaaattatccacagatcggattgaaattcctgtcgtacaccttgcccgcttcaacgagggtgtgaaccgttcaaagccggtcaaagacccctatgggtggggatcatctaccatcgtgaacattttgaaaaaacgagagtatttagggcataccatcaatttcaaaacccgcaagcactttaaggacaagaaaagccactatgtttctgaggacgaatggacgatctttgagaatacccatgaagccattatcgaccagcagacctttgatttggcgcagaaaatccgcagcaatgtacggcgttatccaaacggctggggcgaagcggctcccctcacaggcttgctctattgtgccgattgcggcggcaagatgtatgtccaccgcaccaacaatggcaagcgggtttctcaatatacctgttccaattataccaaagttccgtgtgggacactatgccctacacaacaccgtatcaatgagagtgctgtcctgacattggtttccgacacgctccgggctatcgctgaatattcgagaaatgaccggacggaatttattcacactgttcaggagacgcaggttgctcaacagagtgccgatatatcgaaaaagcgcaggcgtctggctgctgcccaaaagagagccggagaactggaaaaactgatttgcaaaatctatgaggacaacgccctcggcaagctgccggatgcacgatataaggcgcttgatgcacagtatgccaaagagcaggacgcacttgagattgaaattgcagagctggaaaaggctgttaccggctatgagcagagccagaaatccgcagagaaatttatagccctaattgataagtatgagaattttgacactctgacaaacaccatgctcaacgagtttgtagagaaaatccttgtccacgaacgcgcccgaaaaggcagtcaggacaccacgcaggaaattgaaatctacttcaattttttagggcgctatatcccaccatccttacagccagttcctttaaccccggaggaacaggaagaactgcggaaaaaagaagaacgcaaggacaggcttcatcagaattatttgaagcggaaagccagcggcgcacagaaacagtatgaggacaaaatcaaggcgaagaaaaaagcggaaatggacgctaagaaagccctgatccgggctgaggatatgaaaaaaggtgttttttctactatcggtcagctaccaaaagaagaaccgcgcaaaggcagcatagcagccagcgcagcagtctaatcatcacgaagcaaaggagaatgaatatgagtaagttgacttacattcgttgtggagattatgatatacccaacctaaaactttctgaacagccggaaacttctatcggcaagtacggcagaatgcgaaaatcctacctaaaggaacatcgccccattctctacaaccatctgctgatgagcgagaagctgtatccacacctgttagagattgagcggacagcacaggggcgtgtggaaaccatgttgcctcacatgatggaagttgcgggtgtcacggaggaactgaaagcctgtgaccctatgcgctgggtggggctgatgaacacattaacggcacagattgaggaaattttaatcagggaactgatttgcagctgaatgggaggtgcggaaaatgctgacctttgaaaagattttgaaagtgtttcaggcatatctggatgatgatccactgtatgaggtggttcagaccagccacggttatacattgatggcatgggaaccccaccggaatgactggtacagcgctgaaatacagaaaaccccggaggatttacggaacgctttgttgggtacatacgccaactttctggaagataagattactggaaatgaccgtgacctgactgtgacagaaaccggagaaatccaacagaggtgtcgggaacttttggaaaagtgccgggaaccttgatatagaaatgccagaaggaggccgcgattatgcgtcctccttctgcttcgcagtctgttccattttgagcgccccgtctatggcaccttcgataatcggcaggtattcttcagggcaaagcttcagcttgtggctgacccgttgccgctgttcgctttcttctcgcataatctccgggttaaaataccgttccacgggaagtccgcagaccttaatcaattggatcatcacaggcaggctcggaatcgcaccttgattctcaatgttggcaagataccgccattcaatcccaaccatttctgccaatgtttttcgtgccagacgccttgcctctcgtgcggctttgacatctgcaccgaaggtttcaaaaccgggacaatcttcaactttcgccatataacatcacccagttacattgtataattcatacttcacccgtggaatgttgctatatgcaggttggttgaagtttataattcacatttcgttccttgcattgttcgagaaagagaactataatatactctatggaggtgcagaatggattatatgacactaaaagaggccgccgaaaaatggggcgtgacacctcgtagagtaaattactattgtgctgccgggcgtattcctggtgctgtaaagatggcaactatctggctaattccaaaagatgcggaaaagccgattgacggaaggacaaaacaaggaaaggagttgcgccatgaataaaatcctgattatagatgatgacaaagagctgtgcgctttgattaaacgtagcgtacaagcagaaaacatagaagctgatttttgtaataccggaaaagagggcttacaaaaattaagagagcaggaataccagcttgtggtgctggatgtgatgatgcccggcatggacgggtttgaaacgctggaagaaattcgcaaggagtacagcttgccgattttgatgttcacatctaaaaatgacagcatttctaaagtacggggcttacgggccggagcggacgattatcttacaaaaccgtttgatatggatgaactgattgcccgtattgcgtctcttattcgccgctacactcgctttaatcagcaagctggagccatacaaaagctaaattttgacggattgcagattgaccttgaaaatcgttctgctactacatcaaacggcacttttgaactgcccccaaaggaatttgatttgctcctgtactgtgcaaaacatcaagggaaaattttgaccaaacagcagatttatgaggaagtatggggcgaagaatatttctatgatgacagtaacattatggcgattatcagtcggcttcgtaaaaaattagaagtcaatccttcaagcccaaagtatatacaaacggtcaaagggattggctaccggtttaataaggaggtgtaatcagcatggaaattatcgtattcttgtccattgtgattgctgttgtggctgtattgacttccatcgttctcgttcggcgtgtaaaaaaacaaatagcagaaatgaccgatgtgctggttgatgtgaaaaacggaaatggcaaccggcgtattctatctgcaacaaatgaactgacagcacctcttgcctatgaaatcaatgagatcgttgtggcctatgaaagcagactttcaactgtacggcagacagaagaaaccaaccgccagcttatgacgagcctttcccatgacgtgcgaacgccccttactactctgcttgggtatcttgacgctacacacaaaggactggtcacaggaaaagaccgggatgattatattgaaaccgcccgtcggaaagcccatgatctgaaagaatacattgatgtactctttgactggttcaagttaaattcaaacgagtttgctttggagatccagagcgttgaggttgcagagctgacaagaaatattctgatcgactggataccgatttttgaggataaacaggttgattatgacattgatattcccgaacagcctgtccgggtaagattggatatggatagctatatgaggatcatcaataaccttattcaaaatgtaatcgctcacagccatgcggacaaaatcaaaatttccctatcgaagaaggaaaataacatggagctgctgctggcggataatggagtgggaattgagaaagaagatttgaaacacatatttgaacggctttataagtgtgataaaggacgctctgaaaaaggcagcggacttggtctttctattgtccatcagcttgtagaaaaaatgggtggaagtataacagttgaaagtttgccgggaaaaggaactgaatttatgttgctttttcctttggagagttaagcgggttcccgtctttatggcgggagcctttgtcattttactggatttcaaattgcaaggttaatgcaaggttgcggcaaggttaatgcaaggttggcatgatagaataccttacagaacaggaggttttgaatatggatacaaattatatcattgaaacaaaaaatctgacaaagcaatacggctcacaaaagagtgtggccgacttaaatatccatgtcaagcgtgggagaatttacggtctgctgggcagaaacggagccggaaaaaccactaccatgaaaatgctgttgggcttaacgaagccgacttccggggaggtcaaaatctggggaaagtctttgcaagggaatgaaaagaagttgctcccccgcattggcagtctaattgagtcccccggcttttatccgaatttgaccgcaacggaaaatctgcgtatttttgctactctacggggagtgccgaacagccatgcaatcagggatgctctggatttggtcgggcttccttacaaggataaaaagctgttttcgcaatactctcttggtatgaagcagcggttggcgattgcccttgcagtcatgcacgacccggaacttttaattttagacgagcctatcaatggacttgaccctatcggtatcgcagaagtacgttcctttattcgtgagctttgtgacgcgcgaggaaaaaccattttgatttccagtcacattctttcggagatttccttgctggctgacgatattggaattatcgaccacggcgcattgctggaagaagaaagccttgccgagctggagcaaaaaagcagtaagcatatccgttttacgctttcggatactgcacaggcggcaagaattttggaacgcaatttccatgaaaaccatttttccatacaggacgaccataatctgcgcctgcacaaccttgatctgcctgtgggtaaaattgtaactgcctttgtagaaaacggattggaggtatcagaagcacatacctgtgaagaaagtcttgaagattacttcaagcgtgtgacagggggcgaaggaattgcttaaactaatcaaatgcgaatttttgaaattgaaacggaagaaatttattccgctgattattctggctgctttcctgtttccaatcccgctgacttatctgatgacaacgccctctatgatggagcgatatacggatcgggcagatgctttcgatggactatttaacatggtgttgggatatggtatccagtttttactgccctgcattattggagtgattgccgctatcctgttctttatggaacgcgacaacgatacattcaaaaatctgcgtacaattcccgtaaccagcacgcaaatggtgcttgcaaagattattgtcctctttctttttggaattgttttttgtgtggcttctaccattgcaacaattctttgcggaattggaacattagaagtttatggaattggttataagctgtttttggcggttgaaacggggatcttcattacggcaggaacactcccgttgattgtccttgttgtctttttcagtaagacctatgttttttccattttgttgtgtgtcttttacagcgttctgaacatgagtgctacggcattgtttgacacactgcctaaaactatgttatggcttctgcccacgccactgactacattttggagtgcgggagatatggcggctcatggaataaaaatggacttggagcaaatgacagggctaattccctcaacatttcaagttgtattcattcttgggatcatggcattggtttcgttcttactaattgacagattatataagcagaggggggaataaacatggttcgcattgtaaaaacagaattttataaattgaaaaggtatcatatcctttgggcgggcgttgcactcatgctcctatccgtcctgctgaccttgtttacctctatggcgaatgatggttccgtttgggattttgcctatcttacagaacaggtcatcaaaaacaatatgtccatgatttttccgatgtgtatcagcctaattgctggatatatgatttctcgtgagcagacggatgacacattgaaaaatattctgactgtgccgatctcttttaagaaactgttgaccggaaaattgattgtgtgcggcgtattgtctattattttcgggctgatatgcagtctgtttacaatcatagcagaaatgattgtgggatttcccggctttgagatttccttagctctaaaagcagccttgcagattactgcggttaatttctttttatatcttgcggttctgccgattatcgctcttacttgtcggagggcaggcagctttttagtcggtgtaatcattgcttttgtctatggatatggagggatgtttgccgcaggaaatatgacattagcaaacctttatccgattaccgcaagtcttggaatggtaggctaccgtagctatgataccgcagtcaactggaatattggaacctgttcttgcagtcttgcgcttgctgtcgttatttctgccatcttgattttgtgcatgaaagaacgagaagcaacccaaacaaagaaaaaggccaaaaaggtagctccaaagaaaggctggtgatgattttatgaagaaaatagttttagcattagcatttgtccttttgggaagttttatgatttctggctgttcaaaagatgaaattctcaatcattacaataacattgttcagtctgcgggctccatagaactgacagggaaatcgtcactgcaaggggaaaaagaaaaaggaattgatgattatacagggacttatacggctgattatgcgaacttttcaggtacagagtatttgttcggaggaacttccataaagagagaagccggtaaggagctgtctattgattgcaccttggagattacggaaggtactgcaaaagtattttggatttctggatctgatgaagcagtcacgttgattgaggcaaccggaacttatagtgacacaattacacttcctgatggtggaaattatattggcattgaatgtgagaatttcactggaaacattgaattaaatattgaataatactctgccggacgacggcaaaagaaaaaaagccgtcgtagagcagacaatttgacacgcccatttgaaacggcggctttgattttcagagccgccgtttctttgcgtttgcacaaaccaatgacgacttgcagggacacggtagccgattggaggttgatttaccgtgtccttctttttatttcgcagtatccatgatctgcaccagttaaaaaaagcctgttcccagcagcggagcaatgcggtcagaagtatgcactataccatgtaactaaacagcaaaatatactctattacgctcgtatggctttatgccgtccgggcgtttttttgtccctatggagccagaacatcgggtcagcatggcccgaactttatccccggtgccgctctccgccaccccattcagattttcccgaaaaaatctgaatggaggaaaggcagatggaagttaccatcaattataacggacaagctgtggccgtggaggttacgctggaagtctatgaatttcttgaccgggccgatcacaaaacggagaacctgttccatgaacagcggcggcattgggatggccgggagtttgacgagtacatagcttttaccgagggcgtgggcgtttacagcgaaacgccggaggaatacctttgccgcatggaaacgctgcatgagctgatggctgttctggacacttgtaccgaggcccagcgccgccggttcctgttctatgcgcttgacgggctgagccttgcagagatcggtgtgctgtgcggctgctccaaagtggctgtgtatcaaagtgtggaggcggtcagaaaaaaatttataaatttctttgagaacaggcttaacgaatgacctgttttcgggctaccaagtgaaagggattttcccttatcccagcgaggggcggacagcggacaagctgtccgcctctccgattttcaggaggtaagcctatgaaaacaatcaatctgcggtggatgtatccccactaccggcatgacgagtttgtagatgttacggacgaggtatgggcagcgatgtatcaggccaagcgggagatggagaactatgagcgtcggaaagtctaccaccgcgcctactactctctggacgcatacagctggctggaaaattacgcgctggaacacagcagatcgccggaagatattttgctggaacgagaagaaatgaccacccgcctgcatctgatagcagctctgccggtggctctggctcatgccactccgacacaggcccgccgtgttcacgcctactacattgccggtatcaagcagccggaaatctcccggagagagggcgtccacagcagcaaggtcagcgtttcaatccgtcgggggctgcggaatatgcgccgttgctatgatggtcttttccaaacagagtgagggcgtgcctatgcagaccatcaacctcaaacaatattatccattttgcaaagaggacatttttgtggaggtgtccgatgagatcgtcgaagcgtttcttctggacaagagagccgaggccgccagagatcgcaagatgttccggtataaggcgttttattccctcgattgtaacgatggaatcgaaaatgccgccatcggctgggcgcagccatcgccggaggactacctgatagaaaaagaagaattagccgaatacgaagaattgatacggcgattgtacgaagccatttcctccctgccgcctatgcaggctcgccgtgttcacgcccgctatatgctgggtatgaaagtgaaagatattgccgcaatggagggtatcacgccatcacaggcgggaaaatccatccatgccgcactgcggaggctgcgccggtactttgctcgacagaaatggacggtcaatctatgagtatttccaaagaaaagaggtgcctgacatgaacgaaaaaattacagcccacccccaaaaagaagaacgggagaaagtcctgaaggagattcggcagcttgaaaaccgaaagaagattttggagaacaagcagcggaacgaagaacgcagggttcgcacccgccgcctgattgagcgtggagccgttttggaggggattttcccgttggctcccgacctttccggcgcagaggttaaagcatttttgattgccctgtctcatcttccgggggctgcggaattgactgcaaacctgccaaaatccggggacacgccataagtcccttgtttacaagggcgcacttatacaccgttgccggtgctgtgcgccctgccgggggcattgcgtacttcgtccgcgatgggaagctacgctccccaaaccccttgtgcgctctgcacagccaaacacccgctttgcgtttgtccggctccacagagcctgttatcccctcactgaaaggaggtgttccccatagatttctgtcatatccccgtcagtatcatcaagcgcagcgcaggccgttctgctgttgccgcagctgcttaccgcagcggaaccaagctgacaaatgaatgggacggcatgacccacgactacacccggaaaggcggcattgtccatgcggagatcatgctgcctgcccatgcgccgccggaatttgcagaccgatctatcctctggaacagcgtggagcaaatcgagaaagcaagggacagccagcttgcccgcgagatcgaagcagccctgccccgtgaactgtccggcgaacagcagcttgcccttgtgcgtgcctatgtgaaggacaactttgtagacaaaggaatgtgcgccgactttgctatccatgacaagggaaccggcaacccccatgttcatatcatgatgaccgtccggcccctgaaagaaaatggcgcatggggcgcaaagtgccgcaaggcatacgacctggacgaaaacggccagcgtatcccggatgggaaaggcggttggaaaaatcacagagaggatacgaccgactggaacgataaaggaaatgtggagatttggcgggcagcgtgggcggcctacaccaatcgggcgttggaatctgccggtagaccggagcgcattgaccatcgcagctacaagcggcagggcattgataagattccctctgtccatctggggccagccgccagccaaatggaaaagcgcggcatccgcaccgacaagggcgaagtaaaccggcagatcgctgccgacaacaagctgctgaaagaaatcaaagcccgcattacccgtctttacaactggtctaaggccgaagccgaaaagccggagggtcagcagcccagcatgattgacttgtgggaggcccagcagcagctcaagcggcctgacacccgcaccggcaaaatccgggctttgcaggaaagcgctgcactattcagctttttgcaggcaaacggcatccagtctatgcagcagcttcatgaaaaaatcgctgatatgaacagccgttactatgacctgcggggaaaaatcgtcaaagctgagcgtcggatcgccattcttaccgaacgcggggagatgtgggaacagtacaaccagtacaagtccatccacaagcagcttgccaaagtaaagccggaaaagcgggaacagtttgagcagcgccacagccgggaactgatcctgtatgatgcagcagcccggtatctgaaagaactgaaagacagcggcgaggggataaccccgaaggcatggcagctggaaattgaccagctggccgctggaaagcagacggacacgcttgccatgaaatccatgcgggaggatttgaaatcagtggaacggctccgcaaaaccgccgagcagctgtcccgacaggaacgggataagcctcacgaccgggagccggatcggtaaaggatactgcattttggcgtacccatatcaagtgcatcgcatttcacgacatacttttgcacacagaaaaaccgccgtacaggtttccccatacggcggcagactgtttatttgccgaacaagtcgctgtgtgtgccggtgcgggccagcgtcagcaccagaacatcatcttctatgcggtagacaagcagccagtccgggagaatgtgacattcccgatggcctgcccaatcgccggacaggtcatggtcacggttcttatccggcagcggttcgcccatcgccagcaacgctacgacctgctccagcagttcgatcttcaagccacgcttgatggctcgtttgtagtcttttttgaaactggtcgtgtacttgacggtatatttggtttctttcatcttttcaggtcagcaaataactcgtcaaggtcattgtagccctttacagacgggtcttttgcaatcctttccgcttccagcatggcagcaaccgtttctttgttcggctgttccagccttacttcaaagggaatgccgccttcacgaagcgactggcgcacaaagatgttaaacgccgtagtcaggttcatgccaagttcagtaaacagtgcgtccgcctgcgctttcaaatctgcgtccatgcggatactgatgtttgtggtatttccagccatacgatcaacccctttctgctggcaattatagtatatgccatttgcacgaagaaaacaatactttgcacgaatatttaacaataaattcattcaaggaggttaccggctttatgaaagaaatcatttatgaagaataataagtctgaacctatccccgtcatggattaccgccagtaccgcagagcgcggcggctggtacatgagtgctgcaactacatcggcggcaactgtatcgcgctggatgatggggagaaatgtgtctgtgtccagtccatttcctactccctgttatgccggtggtttcggacggcggtattgccgcaggataaggaactggaaacggcgctgttccaccggctgaatgctaagaaatgcgccgtatgtggggcgctgtttacccccggttctaacagggccaaatactgcccggaatgtgccacacgcatgaagcggatcaacgccgcaaagcgtaagcgaaaacaacgggagaaatgtcacgctttaggggctgaaaaacccttgtaaatcaaggattttttcgagggtgtcaaaggcaggctgatagatttatcctccggcccctaaaacggccttaaaatgcgtacagaatcccaagagaaaccccaaggaggaaccctatgtcagacaaccgaaaatattattacctgaaactcaaagaaaactattttgacgatgattccatcgtgctgctggaaagtatgcaggatggtgtgctgtattccaacattctgctcaagctgtatctgaaatcgctgaaacatggtggacggcttcaacttgacgaggacattccttacacggcgcagatgatcgccaccattacccgccagcagatcggcactgtggagagagccttgcagatctttttgaagctgggtcttgtggaagtgctggacagtggcacattctacatgagcaacatcgaacttttaatcggccagtcctctaccgaggccgagcgaaagcgggctgcaaggcttcaaaataaggctctttctgcgccccggacaaacggcggacatttgtccgacattcgtccaccagagatagagatagagttagagaaagagatagagataaagagagagatagagaagggacgctccgcccgcgcctatggccgttaccagaatgttttcctgacggacggggaactggcagacttacaggccagctttcccactgtatggagccagtacatcgaaaagctatccgagtacatggcttctaccggcaagcggtatcagagccatgccgccaccatccggcgctgggccggtgaggacgctaaaaaaactgtcacaccctcacgcaaccgggattacagcgtaaaggaggatgaaactgtatgattgagattaccgcagaaatccgggcattcatcgacaaggcagctgccggtgtggaattggctgaggacgagtatatagacccgtcagacgggctcattcactgtaagaaatgcggcggccaaaggcagaccgttgtgccatgctttgggaaatccggctactttatgccgcgctgcatctgccagtgccagcgggaagctgaggagcagcgcaaggctgctgaagaacggcagcgccgcatggagcgtatcaaacgccgaaaggcacagggtttgcaagaccgctatctctatgactacacctttgccaacgacaacggccaaaatcccctgatggacaaggcccgcgcatatgtggagaactggaaagaggcatataagagcaatatcgggcttttgctgtttggagatgtgggaaccggcaagtctttcttcgccggatgtattgccaacgctttgcttgaccgggatgtgccggtgctgatgacgaactttcccaccattctgaaccgcttgaccaggatgttctctgaggacaggtcggagtttattgccagctttgacgagtatgacctgcttatcattgacgatttgggtgtagagcgcagtaccgaatatgctatggagcagatgtttttcgtcattgacagccgctatcgcagccgcagacccatgattatcacaacaaacttgaaactgtccgagctgaaaaacccgcctgatctggctcacgctcgtatctatgaccgtattttggaacggtgtgcgccgattctttttgacgggaagaatttccgggaagaaaatgccggtgctacccgacagacagcaaaagacattgtaaacagtaagcacgattgattttttaccgggcggcacagaaccgttcggagaaaggagcgccatgaacaaagaaccccgtactatgcaggtgtcagacgccgctactgcgtccagagcgccggaaaacacgccagcgatggtaaagaaaatcggtaagacaacctacaaggttcatgtccatttcagcaataccagcacagaaaccatgagcgataaaatcaagcgtatgctcaaaaatgaaattcagcagatgtgacagactgataaacgaagccgccttgtgctaaactgataatggtacgcaccaaaatttttgtcaaggaggacacgaaaatgctttacacagaaaaagagaagcatgaaattgaacgagtaaaggaggtctttgcggaacatctgcggcaaagccctgattttgaactgctctggtcggacaaggtaggctatgtctggctggcgattggcgtaaatccagtctatgtggataccggtaccagaatcgaatctgccgccgatctctgttacaggtgtttggacgatgtagctacggatgttttatatatgacgggcaacgatcacgcgctggaagcagccgatccgctggaattggccgaaatcaagcggcgctgggagccatatatcaaccagctgccagactatgcgtatctctgcaaagacctgctgaacggaaaaatgtaatctatcaaacgaggtgtcaggagccatacagtgcttctggcaccttttttgtagatttttgtgaatttgatgaaaaagtccttgacaatttgtctctggaaaaactgccaaatcgattcttatttcttgtggtgcaagacttgctccctttgatattcaggaacttagggacttgatgagtgacgatgaacttgagcttgatacactgggagatagaaaaacagcactatttgttattatctccgataccgatgatacatttaactttgtagtatccattatgtactcacagttatttaatcttttatgtgataaagccgatgatgtatatggcggacgattacctgtccatgtgaggtgtctacttgatgagttcgctaatatcggcttaattcctaagtttgagaagttaattgcaacaatccgttcaagagagatttcagcaagtatcatacttcaagcacaatctcagctaaaggcaatctacaaggataacgctgatacaatcgtaggtaactgtgatagtaccttgtttcttggtggcaaggagaaaactacgctaaaagaattgtctgaaacactgggaaaagaaactatcgacctgtataacacgtcggaaacaaggtcaaatcaaaagagctttggtttaaactatcaaaagactggtaaggatatgccatacttgttcgtgaagagttcagttgccttgaatttcacatgaacagggacacgatcaactggattctgaaaaaactgaatacaggaggtcgaacatggagcatttaccaaagaaaatccatcacaacggcatcagctatacgctggtgggagactactatatccccgatctaaagttgtcggaggaaatccgccccatcgggcggtggggtcggatacacaaggcgtttctgcaagaacaccgtcccggccagtacaatgaactgcttctgtcgggaaaactctggacgtatcttgccgatctgaacgagcaggccgatgaccgactggcgtgtatcatctcgcagatgcaggctgcggagggcgtcaccgaggaactgaaagcccgtgaccagcttgcatgggtcgggggcatgaacagcatccgcagccgggtagaggaaatcatcctgtctgagatgatttttgtctgagggaggtgggtgcatgattctggaagaaatgtataacggcagattttatccctgtgaaacggtggtcgctgattcaccgaggttcaagcaggcagtcaaagccagcgccgccctgatggacactttatcggagcgtctgagcaaagaggactatgcactggttgaagaactgcgggagcaggtggcaatcgcccagtgtgaggaaaacgaaagccacttcaaatatggcttttctgcggggctgcttgttcagcaggaagcccatgcacaggtatcgcagaaagacaaagaatagcatcttcaatagtgactgttcccaaactgggcacaaccactacaacagaatacagcttcacgaaagccatttgccaatcaatcggcggatggcttttttgccgcttccggatatggaaattttacttccgcttacgtctggccttgcggttgggaggaatggggctggcctttcccctcatattgttggagcttttgagctgcttggacaggctcagtatccgcaggaacgccgagaagtcctccgaggaaatcttctcaaagggtatctgcaacttatcgcagaactcgtggatcagcatttctgtatcgctgccctgccctatggcctgctcaaatttttccttcacatcatccagcgtgggctgcgggtcggcggtggtcttgtctttgcggtgtgcttcccggatgtcccggacgatgctgtccagatcatcgtgcatgacgtggctgtaaaaatcgctttcctgcacctgccccagttccagcgtccgcatatagaggtcatcttctccgggtgcatacttgttcatgacggtctgccgggtggcctccaacaccagattcatctgctccacccgcatattggcgatctggtcgatgcagatttccatatctatcatcagccgccggaaattcgggtgggtagccagttcgcagagaagccggttgttgattttgccgctgctcaaaagttccaccatatcatcactcagatgcagagattgaagttctatgtttgggtgatttttattttccgtcagccccatcagatagtcggtggacacgccgtaaaagtccgccagcgttgcaatcgcaaacgggctgatgtccttgtagtcatcggtttcgtattttcccagcgcggatttagacaggccggtctgctccgccagttgttccagcgtcaggtgcttatctaccacccgcaggtctttgagccgctccgggattgtcagctttgcgtacatccaaagccccctctctcgttatcgtttttcagtgattacacccattatagcacgattccataagcgtggaaatatgcggatttcaagcgtttttccgacgttttggatatacgggaaagggcctcttttttcggtaaactggttcttgcagacaggcacagaaccttgaaaatcgaatgaccggctgcaaggggtatggcctccggggaagtgacgccaggacagaaatcgagcgcaccaaagaggccgatacgccgggagaaattccgggcaggagcggcttgcaggcagaccggcagacagaaacaagtttatcaatcatgcggggcgcatggctccgcagcaaagaaacggaggaaatcattatgacactgagtatgaaagaaaagaagattctctacgcttacggctgtcccagccaccacaatacggtgacacggctgaaatggctgacggcactgacggttgacccggaggccaaacgccggatgctggggctggcccggaaggtggagacggaggtgggcgaaaactggtacgaggatttttaccaccatctgcggatggagatggacgagtaccgccgcctcaagcgcagcctgcgtgtgctgaaatcttacactgattatgaggaggatctgtatgaggaagctgtctaagtatgagaaagaaaccattatcaactggaacgaggcggaaaaccttgccagcgtctacaccttcaacgccagcttgaagcgcaggctggctgatttcagccggaagtacccgctgctgtgccggttggagcgcagcacgccggagggcagcgtgacctatgtgctggataagtcccggctgtcgatccggctggtgccgccgtacagcgaggaacggaaagccgccgccagcgcctacgcaaaagagcatggctttcaggtggtaggggcggaagaaaaaatcgcctgaaaccggggcgtttacggaaaaaatgccgggtctgcacccgctgttttgaccggcaatccccgcaggcgtattccgtatccattccccgcttatgggcgcaaatgtgcggatacggagccggtgaaactggcaaacaccgcttctgcggtggaatccagcttcgccggtgcgggagtacagagggcagccagccctttgtgccggggtgcaggggcggcagcgcactgctggggtcaaggggcaacgcccattggcaggttaagggcggcagccattatcgggtcaagggtgaaacgccttgcccagggagagttgatgcctgcgtcaactcgtactgggtattacctgacgcaaaattcgcaggatttgcggcttcgccgccccttccccggccccagaacatcttcgcaggaaggaggaaatctgtttgaaactgacacgacacaatgggcgctccggcaagcatggcacctataatccccgccacaatgaccgccggttcgatgtggagaacagcgaacacattgacgcagaacgggcaaggcaaaatgtctactgggactgctaccggggctttacgacacacgagttccgggagaacccggagcagccggatttcagctttgaggaaatcgagcggatgtactacaacgagcattacggcggccatgtggaggcccagaacgcccggaatgagaaaacccggcacacggagcgcaaccgcaccgtggaggacttgctgaaaaacaacaagacctgcccggaggaaagcatctaccagatcggcacgatgggagaatccgtcccgccggacacgcttttttccatcgtcaatgagttttatgaggaatttgagcgccgcttcggttcccatatccacatcctggactgggcgctccatctggacgaggggacgccccacatccatgagcggcacgtctttgactgtgagaaccgctacggggaactgtgtccccagcaggaaaaggcgctggaagaactgggcatccctctcccaaaccctgagaagcccaaaggccggaacaacaaccgcaagcagacctttgatgcggtttgccggacgattctgtttgacatcgccagacggcatgggctacatctggatcaggagccgtcctacggcgggcgggactatctggaaaaacaggattatatcctgatgaaacagaaggagcaactggcggcgcaggagcagaagctggaagaactgacgctcaaaattgaggacgtggagacactgttagatgatgtttccgatgcggcctatgacaaggcggtggaggtggtgaccgataccgtccggcaggagacgcacaaggaagatattcgtctggtggaggaatcgaaaaaatgggtgctttcgccggagcgcaaagctccaaagaaggaacgtgagtatgccgctgagcgtctggatggggtcattaccaaaatcaaaaacgccatgcagcacgctctggcgaaaatccagcggacgctgatgcagccggaagtcaagcaagccgggaaggagcaggtcaagaagaaagccaaagaatccattatggatattctggcaaaggcaaaaattaatgctgaccgggataaccgggagcgttgggaacgtgaggggcgaatcgccccgaccaaaaagaacgatatagagttgtaaggcatctgattttctgtgaaaaccggatgcctttttctctgtctggaggtgagaaaatcgaatgtgtttgaagcggtgaagcaggctgtccccacaaggcaggctgcggaatcttatgggatacagctcggcaggaacgggatgacctgctgtcccttccatgatgacaaacatcccagcatgaaggttgaccgccggttccactgcttcggctgtcaggcggacggggatgtgattgattttaccgcccgtctgttcgggctgaacaagaaagatgcggccttgaagctggcggaggatttctcggtcggctttgacgctaaaggccatgacccgccccgcaggaagccgggcaagcgaaaaatcagcgaggaactgcgctaccggcaggcggaacagaaatgtttccgggtgttgtgcgattatctgcatctgctggaacgctgggagaaggaatatgccccgcagacgccggaggaagcatggaacccgctgtttgtggaggccctgcaaaaaaagccgtacacggagtatctgctggatattctgctgtccggcagtatggaggaacgggcctgcgtggtcgctgagtatggaaaagaggtgaggaagattgagcagcgaatatcagagtttaccgccagccacccggcaggccgtcatgagcgcagccgaagctttagcgccggagcagagcgttgacgaggtgcgggaaggcctttctgtcacggagaagggccagcccgccaacaccatcggcaactgccggacggtgttctcccatgaccctctcctgcgggacgccatccggctgaacctcctgactgaccgggtggacatcgtgcgggatttgggctggcgcaggaacaccagcgccctgacggatacggatgtgaagtatctgcttctctattttgagcagaactacggcctgaccagcgagaagaaaatgacggcggcgctctccatcgtggcgaatgagaactgctaccatcccatacaggacgtgctgaacggccttgtgtgggacgggacgccccgcatccgctcctgtctccatcacttcttaggtgcagaagtcagcgattatgtagaggaaatgttaaaacacttcctgctgggagccatccggcgggtgttttctcccggctccaaatacgaggaaatgctctgtctggtgggcggacagggggctggcaagtccagcttcttccgcctgctggcgatccgggacgagtggttctccgatgacctgaaaaagctggacgatgaccgggtatttttgaagctgcaaggccactggatcattgagatgtcagagatgctggccaccagcagcgccaaaagcatagaggaaatccgctcgttcatcagtcgccagaaggaaacctaccgcacaccctatgaggcccagcccaaagaccggctgcggcagtgcgtgttcggcggttcatccaacacgctggacttcctgccccttgaccgggccgggaaccggcgtttccttcccatcatgatttacccggagaaagcggaggttcacattttggaggacgaggacgcttccagagcctacctgttgcaggtctgggcggaggccatgaccatctaccgcagcgggaagtattccatgaaattcagcaagtccatccagcggcagcttgtggaggtgcagaaggatttcatgccggaggacacggaggccggtcaaatacagggctttctggaacattataccggcagcatggtctgttccaaacagctttttaaggaggcattgggccacacctatgacgagccgaagcggtggcagcttcacaatatcaacgagatcatgaatacagtggtgacgggctggaagccattctccaatccccggatgttcgccggatacggcaggcagaagggctgggaacgggacgtttccggcaacgaactgcccggcaacgaagatggatttgtggaactgagcgaggaagaatgccgccagttggagcttccgaaggagtggatcgcctgaaaatggcggtctgttgccgggatggttgccacttggttgccgggttcgttgccggggatttccctgtctggatacggaaaaagccagtaaataagggatattttaatatttatcattatctccggcaacgaaagcaacgagatttttcaagaaaattcacaaagtaagatttgcaggccagacggtagtttacaggtttttagaggttcgttgccggacttcgttgccggtgctgccgttcggcctgtctctctatggaggtagcctatggaaaaaagcaaaaatcagaagaataaagtccgttttgtggtggtgcgggagttctccggggagaagtccatgcgggaagcctttgagcagctcattgagcgccagacctgcgaacacttcgaggaatggcgtcatcagcgggaaatggcagaaaaagctgcgtaaaaacggttgattcagggacggggacatggtactataatggtatcgtgtccctgttcatagaaggagaacgctatgagcaggaaaaaacaagtctatgaaaaaatcaccgctctctactgccgtatttctctggatgacggcggcgacaatgagagcatgagcatcagcaaccagaaactcatgctccgggacttcgcagaaaagcatgggatgttccagtatgagtattatgtggatgacggctatacgggtcgcaatttcaaccgcccctcgttccagcgcatgatcgctgacattgaggcggggaaaatcggctgcgtcatcacgaaagacctatcgaggctcggtaggaattatatcgaagctggcagctatatcgaaatctttttccccaaacacaatgtacgctatatcgccgtcacggacggtgtggacagcctgacccgtcaggaaatggacatcacgccctttaagaatatcctgaacgatatgtacagccgggatatttccaaaaaggtgctggcgggacgcatgacccgttcccggcagggaaagttctgcggcgggcagccgcctcttggcctgatgcgtgacccggaggacaaagggcatctgatccttgacccggagactgcgccggtgatccgaaaaatctatgatatggcactggacggctggggctgtatgcggatcgcaaagcagctcatggatgataaaatccccatcaccagagtaaaaagcaatacagaatgtgacgtgaactactattcatgggggagcgcaaggatcagccatatcctgagaaatcccttttataaaggcgcacatcttgtctgccggacacaccagaaaggcatccgctccaacacttatgacattatcccccgtgaggattgggaggtcatcgagggctgccacgaagcgattgtgacgccggaggaatgggaacaggtacaggacatcattgaccgcaggccaaccattatgaaaggcaacgcctgccccttctataacctgttccacgggcttgtctactgcgccacctgcgggaagtccatgcaggtgcggtatgaaaaggtcggcagaaccgggaagaaccgcttcaccggcgaaatgcgggagccgattgacagggcatactatatctgccagacttacaaccggctgggcaagaacgcctgtaccagccacaagattgaggcaagggatttgtacaatctggtgctgaaggatatacaggaattggcggcgcaggccatgaaggacgccgatgcgttctaccagcggctcagcagccggatggagcgccggtatctggtggacgcttcccagacagagaaggaacggaaacggctggaagaccggaatcaggaaattgacgggatgtttttgagcctgtacaccgataaggccaaaggcgtcctcaccgagcagcggtttatgaagctgacggcggcgctggaacaggagcaggaagccaatcagaaacgcctgcacgatctggcggtgatgcagagccgggcggacgcacaggaaagcgaagtccgaacctttatcaaggaaatccggcgctatgccgccattgcggaactggacgagtccgtactgaaccggcttatcagcaaaatcctgatcggcgaggttaagaaggtggacggtcagaaggtgcaggaagtcagaattgtttataactttgtcggggaaatcccggagattgcagcgtaaatagtttgccccatctctcaaccattgagggatggggcttttctcattcagtattcaatcaccagtgtttcctcccgtccatccgggaacgtgtaaacaaactttgctgctgtatctttgcaagcccaaaagaacagatcgttgcactccatgtccagctccacattaccctggaaagtgtcggtcaattgtatggtctgaaaacaaggaaatcgctccgtattggtgcgggaaagctgttgccgtaaaatctcatacatccctttctttgtaacaggattttctaaaatgtagcgatagcggaaccgttcattgctaaagcggttgctattgattacccgaagcagatagtcggtaaactttggtggcatgatgctctcaatacttaccacaacttttcgctccgggctgttatggatttgagtaatcagggaagaaagcacctgcggagataagatgataaaatccatttctcccttgataattagcgtgtactctttcatttcaggccccttttttgctggggttagatagcgatactttttacatctaccatgttgcggcggtcatggttgacaacttgcgtcggctcctgctcggtatcaacctgtccgacaaagctataatggatttcgattttccgggtgttggtttcccggtctaattcatgtatcaaaatacggtcgataaactcatggacgttttcataggtcaattcctgtatgtcgctgtatttcccgacaatctgaataaaccttgatatatccctttttcgctcggtaacggttgcgatctgctgttgtaactcgtctatccttgcggcaagggatttcttttcgtccacatagccggaagttagaaacacaaaccgttcatctgtcagtctgcctaatgcgttgtcctcatacagcttgcggaaaagcgtgtcaagttcggtcatacgcgcctgtgctttgaaaagttccttttgctgctgcgctaatgcctttctcgcttccatgtcgccgtactcggtagctttacagataaagtcctgttcgtgttccttaacataccgcaaaacccgccgcatatcttccagcactaaatcaagaagtacgtttttgcggatataatgagaggtacactcgctgcctgtccttgccctgttgcgccatgcgccgcaagaataggaaaacttgcgcggctcgatatttacgccctgttggtaatacatcttatgtctgcaaccagcgcaaaacagcaagccggaaaaaatatcaatctccgctgcttttgtcgggcggtggcgggtagcaatccgcttttgcgcaagttcaaaggtttcctcgtcaacaagcggctcatgggtgtttgggaagaaatagcgttgttcttcttcgttcttccgggtctttttcgacttgtaggataccttgtgagttttcgcggttatggtatgccctaaatattcctgccttgctaatatgtcatagagcgttttgtccggccaagtatagggggcgatcattgcccgctgataccgcgcctgtcctgtacgctgatagcgcaacgctccaatcgtcaagactttgttttccgcaagccatttttggatttcgcacatacgcacgccgctaacaaacatagcgaaaacctgtttgacaatcggcgcggtttccgggtcgggtataaggtggtggcggttgttcgggtctgggatatagccgtatggatattccccgttgacgcgctcgcctttttgcgcctgtgcctgtttaactgcgcggattttcttgcttgtgtcgcgggcgtaaaactcgttaaaccagttccgcaagggggtaaactcgttatcctcccgcgctgtgtcaactccgtcgttgatcgcgatatagcgtactccgttttcgggaaatacaatctctatgagttcgcccgttttcagatagtttctgccaagacgggaaaggtctttggtaatgaccgtcgccactcgtccggcttccacttcctgcaacatcgcttgcagcccctcgcgctcaaaactcacgccggaaaatccgtcgtccacaaaaaactttgtgttcaaaaaatggtgttcgtccgcatagcgttgaagtatcattttttggtgctgtatgcttccgctttctccggcttgcatatcctcttgacttaaacggcagtaaagggcggtgattttattcgactgtaacattagtcctcctttccgacagccgaataaacaggtataatgtgttgctatcattataccatatcccgccgcctaatgcactactcggacgctaaaaatcccggatttccgggctttttctgcaaatcctttacaatgagtttctcaatctttttatggattgtatcggttgccttttcactcggcaacgcttgaacaagataggtgattttccctattttgcgttcggttgtaattgtctgttttttatccattagaaaaacctccttttcctgtatggataaactatattcgtcaaaaggcaaaaacgggcggttgttagctgcaacctcacgggagtttcaccccggcccatgcttatgggtgcgccgcgcaatactttgagggtgttcaacgcgggagtatcattgtgccgccttgtatgtcgtcgcccacaagctgctaaacctgttttacggcgcggtagttctcgctcggcttttcccctatggggaaaagctgtcatggcgtacccgccgactggctcggtacagacggaatgtacccgtttgcctgttatgctgcgcaccaaaggccgctttctttgtcaaagaacaataggctttgtcggcctgcaaaagcacatcaacagcggatatgcttttgcggaacgacaaatagcccataacgggaagcgtggaaaggggacacgctccccgcatgggctaaaagattatcctacatgaaaagcaagggtgcgggtaataaggcgcacttgcagcctgttacgcatttcctcgtccacataggaataggtattgcccgcgtcgtctttcagcgtgcgggtacaaagtttcgctatgtaaccctcgtagtgcttcaagatcgcgcacatggcggttgtgtcgccgtttgccgctgcggaaatgacagggaacggcaacagattttcagacttcctaacggtattcatcatctgcttttccctccaaatactgtttgattttcgcaagcgcggatttcctgtgccggaaaaccgtcgtgcgtacaacattcagcagttcgccaatttccgcgtcgctcatatccaagaagtaggacaaaaggataatgtcgcgtttcctttcgggcaaagcgttaagggcttcggcaagcagttcatttttgacgagtacatcaaagccggacacttgaaaacggaaataatcgctttcgtattcgtccgttgtgaaaagctgcgcgagttcgctttcgctcaaatccgaaaaagtaacttcgcgtgctgcgcgtttcgcaagagtgcggcggtggcttttcgcttcgccgaccaaagttttctttgctaatgcgtcgtactgatgttgtattctttccttgtcggaagaagatagctccatagagttcacctccttcccgcgtggagtagaggacgggagttaagggcttgtcctctctgcccctttcgctccgtacccgttcgggagatggctcttgagtgcgcttttcagaaaaaagttgaaaaaagcaaaatgcgcccgtccgcaagacgcggacgggcgcaaaggaaatgtaagcagtagctaaatgtattgacagttcacattcatagccggaatatcccgcttgcggagcatagctttttttgaccgcaaagcattaggcgggttacagtaaataaaaatggacacggcgatacctccccgataccgccgtatccttaaaaaagggcgactttaatacactacccgcaatccattctataatagggaacagcggcttttgcgcaatattaaataaaaaagccgataacacataggttttttgacctaatgcgttatcggctctgcgtctatgcgtctggcacttttaatcatttttttttgaatttattatatgtgttagctaactgtccacaagccgcgttaatctctctgccatgagaaactctcatagtaacttcaagtcctgcttgctctaattgatgtttgaatgcaactatttcccgtttctgtggtgctttaattcttgaattgcttgttgggttgtattgtaacacgttaatcataacttttttgccccgaaaccattttgcaagttgtcttacatctgagggccggtcatttatacccggtaaaagcaaatacgcaaagacaattttgcgattatgcctttcagaataggataaggcttgcttaacaacatcttcaatagcatatatgcgcatgtgaggaataatacgatttcttgcagattgtgttgctgcgtgtaaagatattgtcaactgaattttaagatgttcctcgcgcaatttttttaattgatcgaccggaccaactgttgatatggtaatgccgtcggttggaaagttgagcccatatctatctcggagaatatggattgcttttatcaagttgtcataattgaataaaggctctcccatacccataaaaacgatacggtttacttttcgacgcaacaatataatctgttgtacgatttctgacgatgttagattacgaacaaagccatttcgcccggactcacaaaaaatacaaccaacaggacaaccgacttgtgtgctcacgcaaacagttccaccatctcgccgcttgataaaaaccgtttcaatgtatttgttgtctttcagttcgtaaacatacttttcagtatcactgcttttgcaaatattttttaccaacattgatagattttttttgcgtggtaattgcttatataattcttcatataaggcttttgcttcattctcgccaataacttccgacatttctttgtaagtaaatccgtatggatcattccgtacttccgcaggcgtatatttaggtaaacgtttcatttttatatcctttcttctaaataataaaagtttgtttttctgtatttttgattacaatctctaatttttctacatcaatgatatgcgtcaatttgcatttagggcagaaaagaggaaaatcttttaatacagtattatgaaatacttgaactctcgtctttccgttacaaatcggacattttatccaatattttttaagcattatatttcactcgtcctttttacacaagtcataaccaccggctaagccggtggcttgagttggccctataagggcctattaccggcatgcgtctcaagacgcactgaattttatttcacccgcatcatttgccccgcagcccgtaaacgggcagccgctgttctaatgcaagtctttcttcactgataatttgctgttagcagctcgcttcgctcgatgcttgaagctaaagcttttttacggggtacctccaccggcacagccggtggtttccctacccaaaaaatgcacagagcagtacaacaaaactaaggcatagcttgcactatgtctatactatatctatacgtcgttagttttttgtatagcatccgcaaaataagcatgacaaaaaagcccatgttgaaaatgggaaaatcctttttttcaatgcttatctaatacgcatgctatgcaacataaacgccgcctccttttacataaattttattttatcagaaaatcagtctactgtcaatacacaacaggaagtatttaacctaatgatatgaattgtgtggacatatccaaaaagaaaggtgaactgtaaaatgtaacagggtgaatgaaaatggcaaaaagacccgtaccattgtacgactttaaggctttcggggcagctataaaagccgcgagaaatgaatacggcgagagccgcaaaaaggtaagcgacgagttatatatttccccgcgctaccttgcgaatatcgagaacaagttgcaatataattcagttcttcagcaacagcacattgatagacagaatctctataacaaactttcaaaaggacaagataaatcgtaagaagaaaaggcgctttgagtgcgccaagttcagaaaaccatgtcaatgtatacgcacacaaaaaacttatacctgttataagccatctatttacagaagcacgataccgtggttctttgcaaaaacaaatactgaataaatacagtcccaaagattctgtcagcgttgctgttatgtcgagcacttgatataaccacattacagcatatccccccaatagtccgtcagccgttccataaattctttccgtttcggctggctgatgggaatgatctcgcctgtaatcaattcaatgtccagcttcttgatgcctttcacatagaacagattgacaatgtagctggtatggcagcgcacaaagtctttgtcgcaaagctcccgttccacttctttcatgctcttatagcagataatattttcctgctcggtatggaacatcagattgcggttatatgtttcaacatatcgaattgattttagcggcaccttatatttgccggtatcgttggtaatcaccagagagggggtatcttctttctggctgcgctccaagaatttgtccatttctgatttgagccgggcatatttcatgggcttaatgatgtagttcgtcgcatggtatttatatccctcaagcccatactgtgtaagagtagtgagaaaaataatgcccacggtttcgtccatttgccggatacgctcggcagcatgaagtccgtccaccaccttcatttgaatatcaaggaaaatcaggtctatggttggatcgtatttttcaatcagctccataccgtcatagtacggggtaatctttatgtcccgtcctgtttccttgctgtattggttcagtaaatcggtcaaatactgaacaaagtctttttcatcatcacaaattgctatatgcagcactgtatcacctgctttcgttataccgtctgtcctttggcttctctgcctccttggggatcagccagacaccggccattttgacagcaccggggatgcgtccatcggtgcagtaataatttatctgtcgggacgaaacgccccatttttcgcttgcctctttgagcgtcatgtagtccatattcgcacctccgacaacatttcttattatatttcatcagctcgaagaacgcaaggcaggaaatgtgaatagatgttgaatacgctgctatcgaagaaggatttctttgatagctttttttaattcatcacttgacattgtggcaaagaactgatgagtcaagatgagattactgtaatggacggtggaaaatgtatatttcagcttagaggtgtcagaccttttctttcagataaatacgatattacaaagcacaagaattataagctgcttgaggattatgacaagaagaatttgtttgacatagaaagctatatgaagcgaaaaggaaaagcaaaattaaatagagagacggttattacaagaatgcagtaagtcttaaaaagatttgctgtttttttattcaaaatcaggaggcaagatgataaggatcagaaatcccacttaaacgaaaactaaatagtaagagtatcagcgattggaaaagaaaaactccagtcgttttttttattgaaatgaaaaggagaaatttaaaaagatgaaacaagaaatgattaacatcaacgccaacttagtggcagaacctactttctcaagttttgaaaaagagggtgaagaagtagaagttgtaaactttacgcttgtaaaaaaatatggaaagggcaaggagtacatcaattgtgcagcctacggagaaaaagcagagaaagcagaggactttgaaaaaggcgatttgattcatgtattcggctactttaagaagcgtgaaaaagagggaaagacttacaaaaactttgtagtgaagtcatataacaagattgagaagaaagaagaaaatgaggaggaataaattatggaatttttcgcacaggcagtaaatgtattaaagattttagttatggcagtaggtgctggacttggagcatggggagttattaaccttatggaaggatatggtaatgataatccgggagcgaaatctcagggcatcaagcagtttatggctaattaaagggaacaaaaagaaaggaaaagcacaatccagacggtatcagcggcaggctacaagaataaattgtgatttcacaagattggtgctataataagagaaaagttcctgccggggcagccgccccggtggtatggatagaaaggcaggaaagcaatatgcacatcagctataaaccactctggcatacactgttagagcgtgatatgagaaaagaagatttaaggcttgccgccggtatgacaacgaatatgattgccaacatgagcaaagagggaaagcacatcagcatggacacattagcccgtatctgcgaaacgctgaattgtgagattaccgatgtgattgagttagtatcagacgagcctgcttccacaggaggtaaggagcatgagcgaattgaaaccaagaataacggaaaacggaattgattatatccttgtcggagattactatatcccagatttgaagctgccggaggaacatcgccctatcggaaagtacggacggatgcaccgggagtatttaagagaagtccacccagccaaattgaacaccttgaccttgacaggggagttatggacataccttgcagacctgaacgaacaggcacaggaacggttagacaccatcatggagcagatgaaagatgccgagggcgtgaccgaggaattgaaacgaacccaacaaatggaatgggtgcggcgttgcaataacattcacaaccgggcagaagaaattattttgcaagagatgatttattcataacggtatggtagaatgattatgacaaataagaattttttgctccatacgcccttgacaatagtccttacaatatactataatagtatttgtaaatattatttgtaagaggaggacttatggaaaacaatcattttaacgttgcgtgggcgaaaagcactgcgctatatacaaaagcagcttcagtacttggcatcggatacccggaaatgatggtgctgtatgcgctggaatccatgggagaactgacgcaaaagcagatcgcagagaatttcggtatgcaaaaacagacggttcatacggtcgtgagcgcacttcaaaagaagggctatttactgttggaggccagcgagggcgataaacgtgagaagcggatcgtcttgactgaaagcggacaggtatacgcccacagaatgattgcgcctttacgaaaagccgaggagaaggtttatagaacaatcgggaacgaacggctccaagccatgtgtgaaattcttgaccttttcaatcttctctttgaaagagagctgagaggaggtctgggcagtgaataacaagcggactttctttcagtatgtgattccgtccgtgttatcctttgcgctttccggggtgtatgccatcgttgacggtttctttgtaggcaactcaatcggggatgccggactttccgcaatcaacattgcatatcccatcacggcggtcctgcaatccgtagggacaggaatcggaatgggcggttcagtcaaatactccattctgaaagcagcaggaaatgagaaaaaagcacgggagttcgttgccggtgcaacatggctgatgcttcttttcagcgctgtcctgactgtcaccgttttcttcacttcagagaaaatcctttctgcccttggtgcatcgggcgagttgcttactctgggaaatgagtatatcaaggtaattgcccttggagcgattttacaggtgttcggcaccggactggttccgtttatgcgtaattacggcggttctttgtgggcaatgatcgctatgatctgcggctttgctaccaatattgctcttgactatacttttgtgtgggttcttggacggggcatgtacggtgcggcattggcgaccattattgggcagggagttaccatggcggttgcactcgtgtattgcgccatcaaaaagaacctcactctgaaaatcgcacctgttgataccccgaaaacggcatttcagatattaaaaatcggacttgctccatttggcttgacccttgccccaaatatctctcttgtgatcatcaaccgattttcggtttattatggcggacaggaggctatcgccacctatgcctgtatctcctatatcatctgcattgtttatcttcttttgcagggtgtcggtgatggtagccagccgctcatgagtcagttctacggagcaggcgaagaaaaatcgctcaaacaaaccaaaacgctggcgtatgaattttccatggttttggcggtaatcagtgcgattctgatttacctgctccgtggaaagattggactactgttcggttcatctgccgaggtaaacgcaggggtcataaaggtcatgccgatcttccttgtgtcggttccgtttgacgccatcacacgagtttccgcggcggctttctacgcaaccgaaaaaagtgtgctgtcctatgttctgacctttatcgaacccatcatcatgctggtgttgatgctgatgctgccgccggtgtttggcggtcaaatcacgatttggtggagcgccgtatttgcaaaggtcattaccgcatcagtaagcattgtgctgtccgttagatacagcgcacaaagaaatcgataacttccagtttatcgttctgattttcaactgaataaccacagtaaaaaccgctgctacatggaagctaacaaaccatgcaacagcggtttttctttaccgttttttcctttggctgataggcgttcccattttctttgattttttgagaatccgaatgagccagcggaattcttcttccgacagatttttatagttgataccgagctgcttgcaataaaggatgaccagcttttcatcccgactgcccttgaaattttcgaccgcttccagattttctttcagttcatcggcaacggtggtctggggcgcactctcactgtcctttttgtgagtttcccgaatatcccggataatgagattgaggtcatccagaaccatgtggctgaaatattcatcatcgctgatatgggcggcttgcagcactttcaaatgcgggtcatcttcgccggggcgataccgttcaatgatttcatgccggacggtatcgacaagtgcattgagattttgaatctgcatggtggcaatcccgtccacataaatctcaatgtctgcaagaaacttgataaaatctttatgtgtggcaagctcacagagcagacggttgttaatccgaccgcttttcaggagagcaaccatctcatcattcaaatgcagctccgtcaatgacgtgttgatctgctccctgttctctgtccggcacagtagataatcaacggaaaccccatagaagtctgccagcgtgataaggttgccatgattgatttccttaaaatcctctttttcataacttccgagagcagatttggaaatacccgtcagctttgatagttcttccagatttaagcctttgtccttgcggagttcccaaaggcgttcctgtatgcttgttgctcctttcatgggcgcacactcctttccggcggtttcattgctgccgcttaactggattatatcacactttccgcaatcgtggaaatttctgatttttactcctaattcctactttgtggacatacggcacagggcacaaaaatgttctatgatacaggtagttcatcgatggattattccaatcgaatgaccagcctgtgtgggatatgcttccccggcgatgtagtgccatgacttttggcagggatgtggaggaaccctgaccgaaacgagcgtaccaaagggagcgatacgccgctgtgagattcaggggaggaacgacaccggggagaactggcgaactgacaccgaaatgataccgaaacacgacaatctgatagggggatagcctaccctatcgctgatacttcgggagattttaggcggctctatggctgtaattttgccgaaaatcgccccgaaaccatacactaaaacgggaggaaacacaatatgccgagaatgagtaaaaagaggaaatatgagctttccttttacctcaatgaccgggggcgtgtcacttacaacgaattatgccggaaatgccagcatgggtgcaggcagagcttccgggcggttgtgattgactgcccccgttatttatccaaacgagcaaagaaaaaggaggcacacaccgaatgaattttgaatttatgacgatagacacacccttgccgccctgtatgccctttcccagagcgttgacaggatttccagtcagcagcaccgcaaaggtcatgtactgccggatgctggacgctatgctgtccaaagggcaggaggacgagaacggaatcctgtttgtctgcttccctgtcacagccattgccgcagtcctgtcccgcagtcccatgacggtcaagcgttctctgaatgaactggaaaccgccggacttatcatgcgggtgcgtcagggcgttggagaaccaaacaggatttatgtgctgataccgggaaaggaggacgctgcccttgcctgatacctcaaagctggaaaagctcaacagggagctggagaaaagcgaaaagaagctgcggaaagccattaatgatgaaaaggtattgcagcaccagttgaagcagcttacccgaaaggaacggacgcaccggctctgtacccgtggcggtatgctggaaagttttctgcaagagccggaacgcctgacagatgatgatgtcatgctgttattgaaactcatttttcacaggcaggacacgcaggaactattgaaaaaactgctggaacggaagaagccggaaaccccttagtttactaagggcgcaattatacaccacccagaggttggtgcattgcgttctccgaaggctcctcgccggagggctgtaattttccgcagtcatggtctgctccaaatcatacaggggacgctacgcttcccctgcgctggctgccgccagctacccttttgtgtacttgccatctggggacaccttgcgttgcaagctgttcccagccgacaagtttcataaaatatgctatcttttcgatagccaatgaagtataatgaagatgacaacaaatcggcatttgtaaaggaggatttacaatgaagaaaattggattaggtattgcgatactactctttgccattataatttctctttgctcatcaggaatggggctgctcgttatcggaattgggattgtaggattgattttttcaatcataggatttatagaacgcaagtaaaataacttccagtttgtcagcttcacatcgggtcaacttgccccgaacttttacaattaaatacccgccgcccacatagcggcacaccgagcaggaaatctgaaaaaggtctcctgctttttttctgcccaaaatgaggtggtaaaacgccaccccgtccaccaattagcgaaaggagggacacgaaatgccctgtccacacaacgaaatcacgattgttcagcgcagccagcggcagtctgcggttgccgccgctgcttaccagagtggcgaaaagctgttctgtgaatacgaccagcaagtgaagcactacccggaaaagcgtggtatcgtccacaatgagattctgctcccagcaaatgccccgccggagtatgcagaccgtaataccttatggaacgccgccgaagctgtggaaaaacaatggaactcccagcttgcaaggaggtgggtgcttaccatcccaagagagataccacccgaccagtatgctgtcattgtccgggagttttgtgagcagcagtttgtttccaaaggcatgattgctgattttgcaatccatgacccccatccgccgggacacaatccccacgcccatgtcatgctcactatgagggcaatggacgaacatggaaaatggcttcccaagagccgcaaggtttatgaccttgacgaaaacggggaacggataaaacttccgtccggcagatggaaaagccacaaggaggatacggtggattggaacgaccagaagtattgcgaaatctggcggcatgaatgggaggtcatccagaaccgctatctggaagccaatgaccgcccagagcgtgtggacttgcgttcctatgccagacaggggcttgatatagtccccactgtccatgaggggactgctgtccggcagatggaaaagcggggtatccagacgaacatcggcaacctgaaccgggacatcagagccgccaaccgcctgatgaagtctatccggcagctcattcaaaacctcaaaggctggattaccgagctgggagaaaaacgaaaagaactgcttgcacaaaaggcggcggaggaagcgacacttcttcccaatctgctgatgaagtatatggagatacgaaaggaagaacggaaggactggacaagggctggacagaaccgggggacttcacaggacttaaaggcagtcagcgaagccctgtcctatctccggcaaaaggggctttccactgtggaggacttagaagtatttctggaatcttccgggaaatcagccgccgattaccgcaatcagatgaagccaaaggaaacccgcagcaaagtgattgacgggattcttgccagccggacagactgccaggaatgtaagcctgtctatgagaaataccagaagatatttttcaaaaaaacaaaggagaaattcaaacaggaacacccggaggttgcccggtatgagaaagccgccgcctaccttgccaagcacccggacgataaggacagcacccaaaaggagctgcaagaggagcaggaaacgcttctggaagaaattgcagctctgaaaacaccgctgaccgaggtacaggaggatttgaagaagctgcgggacatccgctactgggtacggaaagccacacccggcacagaggaaagcaaagagccgcccaagaagcagcccatcaaggaagtcttgcaggataagacagacgagaaaaaagcacaaagaactgccccggagcagacaaaacacaaacaacaggatatggaactttaacaggcacttgccattttcaatcagagaatgtcaggtgcttttctttttttcaaggagggatagatttgaatgtatttgaagctgtgaagcagtccgtcacaacaagacaggctgcggagcattatggaatccgtgtaggccggaacgggatggcttgttgcccgttccatcacgataaaaccccaagcatgaagctggatcggcgttaccactgcttcggctgcggtgcggatggggatgtgattgattttgccgccgccctgtatgggctgggaaagaaagaagccgccgtacagctggcacaggacttcgggctttcctatgaggactggaaaccgccggggaaggtaaaaaagcccaagccccggcagaaatccccggaggaacagtttcaggaagcaaaaaaccgctgcttccgtattcttgccgattatcttcacttgcttcgggcatggagaaaggattatgccccgcactccccggaggaagcctttcatccacggtttgtggaagccttacagaagcaagaccaagtggaatatctgctggatgtgctgctctttggggagacagaggaaaaagcagctttgattacggactacggaaaggatgtgatacagcttgaaaagcgaatggcagagcttgccgccgcaaacgcagcaagaactaaaaaacaccatgaacgccatgcagccgccccagagcattgaggaaatcaaggcggggctgggaactaccgagaaaggcggtgtccgtcagagcatacggaactgcctgaccgtattccagcgtgacccgctgctttccggggctatcgcatacaacatcctgaccgaccgcaaggacatcataaagcccatcggcttccacagggaaagcaccgccctgaacgatacggacatgaagtatctgcttctctatctggaagaaacctacgggcttaccaatgagaagaagattgataacgccatcgggattgtggcgaatgaaaacaagtaccatcccatccgggactatctcaatacccttgtgtgggacgggacagaacgaatccgtttctgcctgcggcactttctgggggctgacgcagacgattacacctatgaagcgttgaagctgttcctgctgggcgcaatctcacgagcctttcagccgggatgcaaatttgaaatcatgctctgtctggtaggcggtcagggggctggcaagtccaccttcttccgtctgctggcagtccgggacgagtggttctccgatgatttgcggaagttggacgatgacaatgtgtaccgcaagctgcaaggtcactggattatcgaaatgtcggaaatgatggcaaccgccaacgccaagagcattgaggaaatcaagtcatttttaagccgacagaaagaggtttacaagataccctatgaaacccacccagcagaccgcccccgtcagtgcgtgtttggcggcacttccaatgcccttgacttcctgccccttgaccgttccggcaaccgccgctttatccccgtcatggtgtacccggagcaagccgaggttcacattttggaggacgaagccgcttccagagcctatatcgagcagatgtgggcagaagcgatggaaatttacagaagcggcaggttcaagctggctttcagccctgccatgcagcggtatctcaaagaacaccagcgggattttatgccggaggacaccaaagccgggatgatacaggcgtatcttgataagtacaccgggagcatggtctgctccaagcagctctataaggaagccttgaaccatgcctttgacgagccgaagcaatgggaaatccgggaaatcaacgagattatgaaccagtgcatttctggctggcggtacttcccgaacccaagaatgttttccgaatatggcagacaaaagggctgggagcgtgaaaacccggcaacggacttatgcaacccgtctgaaaaaacgagggacggttttgtggaggtctcagaacagatggagcttccattctgaaaatgacagcccgttgcaccccctgttgctatcccgttgccgagccggttgccggggaaaatcccttatttctgggcttttctcccctatgacaaccaaaacaacagaaaaataaaagaaaagtataaatagtaaccatcgccagattgagattgtttgcaaggtcttttgaagcccgttgccggacttcgttgccgacaccctctgtctggctattttcatgtatggaggataactgcctatggcaaaaaacaaaacagagattcatgttacaacggtgtttgacggggagctggacgcaaccgatgtgttcgtcagcctgatttcccagaaatacggtaagacaaatacgaaagaatatcttgctaaaaagaaagatttgaagtataatgaagatgaggttcaaaagagccagataccgtctggattgtgtgggtaaatggctatgatgaacgaaatggaatacagaacaatcggttcggcacttgccgggggttatcgtgcagcggtctattgcagactgtcaaaggacgatgacctgcaaggcgaaagtgccagtatcgcaaaccagcgtgatatgctggaaaaatactgcgaaaagcagggatgggaggttgtggcagtctatcaggacgatggcttcacaggtcttaatatggagcgtcctgatttacagagaatgttgagagccattgagcgcaggcaaatcaaccttgtcatcacgaaagacctcagccgactggggcgtaactatctgcaaaccgggcatttgattgaggactttttcccaagaaacggtgtccgctatatcgccatgaatgacggtatcgacaccctgcgtgataacaacgatattgccccgttcaagaatatcctgaacgagatgtacagcaaggatatttccaagaaagtccattcctcttatcttctgaaagcgcagaaaggacagtttaccgggtgtcttgccccgtttgggtatcggaaagacccggaggacaaaaaccatctgctcattgacgaggaaaccgccccgattgtgcgactgattttcggatatgccctgaacggtcatggtccgaactatatccgcagacggctggaggaagaaaaaatcccctgccccacatggtggaaccgggaacgggggcttcgcaatacccgcaccaaatgggaaaagaaagacccagaaaaaggacggtatatgtgggacttctccgtcatcaaagaccttttgatgaatcccgtctacaccggggcgattgcttcccagaaaaaggactaccgtttcaaaatcggcacgattggggaaaagaagccggaggactggattgtggtggaggggcagcatgaaccgctgattgaccgcatgagctttgacattgtgcagaataagctgaaatcccgccagcgtccggggcagaccaatgaaatcagcctgtttgccggactgataaaatgcggcgagtgtgggaagtcgctgacggtacgctacacaaacgcaaaacatcctcagcagatttattcctgcaagacctacaatgcctttggaaagaaccactgcacccagcaccggattgattatgacaccctttacagccatgtgctgcggaaaatccgggaatgtgccagagccgccctgatggacggggaagcggttgccgaccgcttgaccaatacctgtgaagccgagcagcgggaacagcgggaagcaatggaacgctccctcacaagggacgaggaacggattgaggttctggacaaaatggtaatgcggctttatgaggatatgattgcagggcgtatcagtgaacagaatttcaacaccatgctggaaaagacacagaccgagcaagcggagcttaaagcaaaagtgtccgagggcagaaagcggctgtccgatgaagtccagcttgccaatgacgcaaaacaatgggtggaagccattcaggaatacgccaatatcacagagctggacgcagccaccctcaaccgcttaatcaaagaaatcgtcgtgcatgagcgcattgacgaagataaaacaagacacatttctatcgaaattcattttaatctcaaacccatcccagaggtggaacaggtcactgcctgacctgtcccgccgggacggttctcttaaaaacaccatatagattttttgtacgccgccgcccgccatcgagcagagttttacacctaattggggataaaacagcttatggcgggaggaggcattgtccttatcggacttaagctgattccgcttcttgcaaatgtactcaagtaataagaaaaggagagcttagatgtttggaatattcgacaagatagaagaattctttaaagagcttctactgggcggtattcaagcaaacttagagtccatgtttcttgacatcaacgataaagttggtgcagttgcaacagatgtaggaaaaactcctatggggtggaacggagatgtatttgcctttattaaaagcattaacgattccgtcattattcccatagcagggctaatcatcacagcagtcctttgtatcgagcttatcaatatggtaatgcaaaagaacaatatgcacgatacagatacttttgaatttttcaagtacatcatcaagatgtggattgctgtatggttagtatcacatgcatttgagttttcaatggcggtctttgatgtggcacagcacatggtaaataaagcggcaggggtaatcaatacttctgccgttatctccggagatcagatagtaaaaatggtagatggattaaaggataaaggtcttggagagcttgtcatgatactctttgaaacctcgcttataaaggtggcaatacaggtcatttcaattgtgattatgcttgtggtttacggaagaatgtttgagatttatgtttactcatccatttcagccattccatttgccacaatgggaaacaaagagtggggacagattggaacaaactatatcaaaggattgtttgccataggtttacaaggactctttttaatggtttgtcttggaatatacgcagtattagttaagacaatacagataacagatatacacacaagtacctttacgatacttggatatgcggttttgctagggttaatgatgttaaagagcggaacactggccaaaagcgtattaaatgcacactaaaagaaaggaagggtaatatgaacaaaagaaaaacagtatttatagtagtaattggagcaggtattatggcgataattgataggatcaggcttcataataaggtggaagaattggaagaaaaaacagaggacattggtcgctgccataacgatttttacctaatacagcaaagatataacaagaacacagacgaacagcttgcgactattcaggaagaaatcggctctgtatatgaacactttgaggagctgtcaaagggtaaagaagatgggaggtaagatatggcatatgtaccaatccctaaagacttaaatagggtaaagacaaaggttgcttttaacctaacgaaaaggcagctcataggcttcacacttgcaggactggttggaataccagtctatttatttatgaggaagtttgtgccaaatgacatagctgtcatattccttatcgtatccacgcttcctatctttttcatcacactatttgaaaaagacggactgacatttgagaaatactttaagtacatttatcttcataagttttatcaaccgcaaaagagagtgagaaaggaggtttaccttgaacaagaaaagaaaaattcagcaaataaaactcatgcaaaacgaaaaggcattgagaagtcaaaagcgggacttaaagaaaagtaattgcaagtcaaaaaaagataagggaggaatccttgaccttatctttaagaaagaaccgaaaagatatacggtagaagataccattccctatctaaggcttttaaaaagcggaatatgccagcttgatgaaaagcacttcagtaaaagtatagcctttcaggacattaactatcagcttgccttagatgaagatagggacttgatttttaatcaatttgcaaacttcctaaactcttttgatccaagtatcagcattgagttttcatatatcaatcagctcggacgaaacgaagaaatgaagtcggcaattcagataccggataaaaaggacggtttcgacgatatacgctttgaatttagagagatgcttaaaagccagattgtaaagggaaataacggattgaaaaaatcaaagtatgtaacctttacagtggaagcggataatttagaacaggcaacatcaaaacttgaaagactggagatagatatattatcgagtcttaaaagtatgggagtaagagcagaaagcctaaacggagaagaaaggctaaagatacttcatgatgttttaaatccaaataaaacatttaaattttcctacaaagacctaaagaaaagggaaagcacaaagacatatattgtgcctgatgagtttaactttacaccgagtagatactttaagttcggcaaattcatcggagcaacaagtcattttcaaatccttgccagtgagctttcagataggatgttatccgagtttttggatattgacgataacatcaatatttcctttcatattagggcaatcgaccaatcggaagccattaagatggtaaaacgaaaaaacactgatattgataagatgaaaattgaggaaaataagaaggcggtaagaagcggttatgatatggacattcttccatcggacttaattacctatggtgaggatgtaaagagcctcttaaaagacttgcagacaagagatgagcgaatgtttgtggtaagtatcgtctttatgaactttgcaaggacagtgcaaaagctcgataacacaattgctcaaataagctccattgcaaataagcataactgtaagctgaaaagacttgaccattctcaggaacaaggtttagtgagcgtgctgcctcttggtgtaaataagattgaaatagatagaggattgacaagctcatcaacggcagtatttatgccatttaccacagaggagctttttatcaattcaagtaatagtctttactacggactaaatgccctaagccataacctgattatggcagatagaaagaaattaaagaacccaaacggtctaatcctcggaactccgggcagcggtaagtcctttagtgccaaaagagaaatggcaaatgcgattttagtaacagatgatgatgtgattatctgcgatccggaaggagagtatggaaacctcgtaaggcagtttaagggagaagtcattaaggtcagcagtaagtcgaaggattacctgaatcctcttgatataaacatgaactacggtgatggggatgcaccgctgaaagacaaggcaaactttatcatgagtatgcttgagcttgtagtaggcggtagtggtcttacagcagaagaaaagtccgttatagataggtgccttcctaaaatctatgaaaagtattttgaacatcctactcctgacaatatgccgatacttcaagacctatacgatatgttaaaagggcaggaagaaaaggtcggtaagaagctggcaacagagatggaaatctatgtatcggggtctctcaatgtctttaatcacaggtcaaatgtggatttaaataagaagctcctttgttttgatattaaggagcttggaagtcaattaaagaaaatcggtatgcttgttattcaggatcaggtgtggaataaggtgtcacaaaacagaggaaacaaggctacaaggtactatatcgacgagttccatttgcttttaaaagatgagcagacagcatcctattccgtagagatttggaaaagatttcgtaaatggggaggtattccaacaggtattacgcagaatgtcaaagacctacttatgagtaaggagatagaaaatatctttgacaatacagactttgtcttaatgcttaatcaagcatcaggagatagggagatacttgcaagaaaacttaaaatctcacttccacagctcagatatgttactaattcaaatgaaggtgagggactcttattctttggaaataccattgtgcctttcattgataagtttccgaaagatacaattttatatcagaagatgactaccaagccggaagaagtgaggtagcctatgggaaagaagctgaaaaaggattttaaggaaaggcataaggcaagccttgaaagagagatgtttcatagtaaaacagatacgatacctgaagaaagtaagctaaaacataacgatgattacagaggtaaaatcgttcatgagaaagaacggtttcaggataaagtgcatgaaaaaacaagtaaggtaagtgctgataatgaaaagtcttatggaacatccaagagaaacgaaaaatatagaacttcagataagggagacgtaaattccgcaattgaaacgggaagatcagattatattacggaggttaaggatggaaaaatctatgatcctttaggaaaagaccttgataatgacgggattatagacagatacgataatgactttagagacagcaactattttgaatcgacctatgatgtggaggataatctttcccataaagaaaaatcattagaaaattcctttaaaaatcataagactcaaaaaagcaggtacaagaggaagaactattctgaaagcctttatacaaggaaaaaggacgatgcaccaaagggaaataaggctgatgataaaaaggcgggaaaagatgctgtcagcggaaaagtttatagcagcctatcaaaagaccaaaagaaaaagctaaaaaaagacatggtaaaggtatctgccctttcaggacttgctaaaggaagtgaaactgtaagagattacttgtctcatggaagtgatgaaaatcaaggagtggaagcaggagaaaagacagcagatacaagctccaagctcattcatggcataaagaagtactctgataagaaaagagctaaaagaggctatgaccttacaaataaggactataaaatcagaaagcgtaagtcaaagttggaatttcgtgatgccaaaaaggaactgaaaaagacggatgagtataaaagagcaagtgcatataaaagatttcaaaagaaaaatcaggtaaaggcagcaatttctcgtgagaataagtcaaggcttagagatcgaattaaagagggacttatcggaacactgaaaagctcaaaggatatgattatccgaaaagcaaaaggactaatgcttattttcataggtatcattatcttagggacttttgtgattaactttgcaggaacgggaatgacaggctttatgaactctacaagctctgtgcttacaacaagctatttatcaaagccaaatgtcctaagtgaaatcaatcagaaattttcagatatggagggtgagcttcaaagtgaagttgactatgtgaaagaaaattatcctggatatgatgaatatatcttaaataatacagaatacatcggtcataatgtccatgagcttttatcctacattacatcaaggtgcggagaggtaaagagtgtatcggaagtagaatccatattaaaagaattatttgagtccatgtatgaccttgagtatagggaagaaattgaaatcagatacaggacggttacggaaacctataccgatgaagatggcaatgaatataccgaaagccacgaagaaccttatgagtataaaaaactcatcgtaacgcttcataaaaaagagatggacagtattatccgaaaggtctttgcaaactatcccgataatctaaagcactatgaagccttgttccttgcacaaggcaatatgagagaagcctttggtaattctgaccttatcagtgcaaatggaggtatcggcggtggaaaagagtatgaggcatctacggaagtacaaaagaagattgttaatgctgcatacattacgccatctccgggtgcaggctggtgtgccatgtgggtatcacaggtctatcaaaatgcaggacttggatatataggcgggaatgcctgtgatatgtaccgaaactatacctttacatcagacaggtcaaagctaaaagtgggaatgcttgtggcagttgaaagcagcagtagcggaagcagtgcagggcttacctatggtcatgtaggtatttacattggagatggaaaagtgattgataacatcggtcgaataagagtaactaccttagatgattggatagcaacattttgtaagcaccatcccgtaggattcggttttccgccaaatgtaaagaaataggaggtaacaatttgaaaaaggaacttacaacagtaaaaaacagaataaagaagttaaaggataaaaaggctctgattgatgaagaattggagcctttattcattcgtgaagaagagcttgaaaatgaagaaatcattgccatttgcagaaagaacaacatcacaatcagcgatttgatagcaaaggtaaacagacaaaaagcagaaatgaaaaaggagaaaacaaatgaaaaccagtttgaaaaagaataataagttttggacggtagcacttgcggtaattgtaagtattagttgtattttaggtctttggacggttgtttatgcacaggagcaaaaatctgaagctccaacaaaaaacgaagctgttcaaacggaagttgaagtaaatgtaaggtatatctttgaagatgaaaaggtctttaaggaagaaaagataaaggctgagaaaggacaacttattgatagcggagatcttccaatgctcccagatgatatgaaattcattgatgaatttctgttttatgaggtaaagggagatggaaaagatgagattatccgtaaggtagcaaagatggaggttaaggataaggaaacgcagacggaagaagaaaagccaaagcaggatgaatgcactcagacagaagataagggaacgcagacagagctttctaaagacgatatttcaaaaatagaaaaagaggcaaaagagcttcaggataaacttgataagttaaattgcgaacttaaggacaaagacaaattaagtgataagcaaaagaataaaattaaagaccttgaagatgaaattgatagcctgaaagaaaaaatgaagaaagataagggaaataaggacttatcagaagatatgaaaaaggaaatagataagctgacggaaaaggtgaaagagcttgagaaaaaggcaactgaaacaaataaagctcctgtaacatcacaatcagttacaccgattagtcctatttccggaattaagacaagttcaggtatttctcctcaaacaccacagacttctgtaagtagtaccggtaaaggctcatcggattcggtaagctcaggtaatactacaaaggataccggtaaaggcaaaacggaagtaaaggagaaagaaaaggaagttcgctatcccaataagttgacggcaaaagctcctgcgaataacagtcaggattcatcaatggggtctgcaagtaagagtgtaaacaccaacaagggagtagcttcatctccgtcaaaggcgagagcatccgttacggagaataaagataatgcaaataaggagtatccgattcatcatggagatagcagcgataacaaagaaacggatcagtattcggcagatgcaaggcagtttattacctttcaaacgaaaaacggtaagacttttcatttaatcatcaatcatgatgaagatagtgagaatgtaatgcttcttacggaagtatctgaagatgatttgcttaacatggtggagaaaaaagaagcaccaaagcaggaagtagtaaaagaagaacctgttaaggaagaagtaaagcctgagaagaaggacgaaaagagtaatttaggaacctatattattttgcttcttgtagtaggtggtgcattaggagcaggctactattttaaggttgtgaaaaagaaagaagataaagaacttgaagccttagaggaggaagatgatgatttcttttctgaatctgaaagcgaggaagaaataaatgatgcagatgaagtagaagatgaagaataaacgcacctaaaaacatattattttgggtgcaaagttagggcgggagagtaacatctttcgccctattttgatttataacaggaggaaaacacagatgaagttagttattgcagaaaagccgagtgttgcaatctccattgcaaaggttattggagcaaataaaaagaaagacggatattatgaaggaaacggatatagggtgagctggtgcgttggacacctaattcaaatggcaaatccggatgcttatgatgaaaagtacgccaagtggaatatggctgatttaccgattattccgagcgactacaagtatgaagtagcaaaggcaaccaagaagcagtttaacatccttaaaaagctgatgaatgataaggaggttgatacggttatcaatgcgtgcgatgcagggcgtgagggagaaagtatttttagacttgtatataatcaagtgaattgtaaaaagaagatgaaacgcctttggatttcttcaatggaagatagtgccattaaagagggttttgataacctaacagacggaaaagactatgataatctctttgaatcggcacaggcaagagctattgcggattggttagtcggaatgaatattagtaggctctactcttgtctgtatcagcaaaattacagtgttggcagagtgcagacacctacccttgccatgattgtaaaaagagatgatgagatagcaaattatcagaaagaaaaatattacacagtagagctttctatgaatggatttacactctccacagacagaattgatgatgaagttgctgctgaacagcttataagtttagtaggcgataagattgaaattactgatgttattcaaaaagaaaaaattacaaagcctgatttaccttttgacctaactacgcttcaaagggagtgcaataaatattttggatatagtgccaagcagacacttgactatactcaaagcctgtatgaaaagaaactgattacttaccccagaacagacagcagatgtttaacagaggatatgattgtgagtacagtcaacaacattttgggtaaaaatgactttgatacagagcgtatcaaggtagtatttaactctaaaaaggttacggaccatcatgcaatcataccgacaatcagttcagtaaaagaagatgtttctgaattacctttaagtgaagcaaaagtttacttccttatatccgataaatttcatgcaagtgtaggctatccgcttattgaaaatacaacaaagattgtagcttcatttgacggttttgaatttacaagttcaggtaaggtaattaaggatgaaggctttagcaaataccttaaagaatacaaatcaaaaaagagtgaagatgctgtattgcccgatgtaagtgttggtgatgttttgagcgttgaaaataaagaggttaaagaaaaatttacccaacctccgaaacactttactgaagatacgctcttaaagtctatggagattgcgggaaatgatgccttagaaaaaggtgtagaggtggaaagaaaaggtcttggcactccggcaacaagggcaggaattattgaaaatctaatctttaagagatttgtcgaaagagataagaagaatctaattgcaacgcataaaggaatcagccttgtaacgattgtagcagatacctttaagtcggcagaaacgacagcaaagtgggaaatggaattatctgatattgctcagggtaaatcctctaagaaagaatttttagatgcgattgaaaatgagataaaagaagcggttttgacatatcgcaagtaagacagcactaatttcagcgtggaaaaaatgctctaaaaatgctataatgcaaagtaatcaatttaatgattgagaggtgattatatgtctaaaataaatgttgaaggttcagaaatcagcattattgccatagacaatagagattatatttctttaacggatatggttagaaatattgagaacggttctgctttgattgaaaagtggctcagaaacaagaatacaatagagtttttaggtatttgggaagaaatgtataacacgaattttaattcccccgaattcgagggaattaaaaatgaagcaggatttaaccgttttatattatcggtcaagcaatgggtggaaaaaactaattctatcggtatcgttgcgagagcaggaagatatggtggaacttatgctcataaagatatagcgtttgagtttgcttcttgggtatcgccatactttaaattatatttaatcaaggaatttgaacgcctaaaggaagaagaacaaaagaagttaggatgggatattaagagaaatttggcaaaaatcaattatagaattcacacagatgccattaaaaacaaacttgtaccggataaactttcaaaagaaaaaatcaattttatttatgcaagtgaagcggatattcttaatgtttctctatttggaataacagctaaggagtggcgtgatgaaaatccggatttaaaaggcaatattagagattatgcggatatatcacagcttgtctgcctttctaatcttgagaatcttaatgcggtatttataaatgaaggcatgagccaatctgaaagattggaaaaattaaatgcaatagctattgaacaaatgaagatactatctgaaagtgaatcaattaaaaaattgaaatagagtaataatatttggtatatagcgaaggtgattagagtaaaatctaaccgccttttttgtttgaaaaaagaaggaggtaaaaatgcgaataaatgattttcataacattttggagctaataaaacaagatgttttgtataatgaagcagaatatctaaagctcctaaaagttgtcggaaacaatcaaaggtatgattttagaagtcaattaagtatatatgataaaaatcctgaagcgacagcctgtgccaagttcgactactggagggaacgctttaaccgaacggttatgcgagggcagaaagggataccaattttagaggattacggcacatataaaaaggtggactatatctttgatataagccagacagtttcaaaaaacagggatgtcaacgaggtcaatctttggagatttgataaagaagcccatcaagatgtcttaaaggaaatgataaaaagcgagggctatgaggaaagtgaaagcacacttgaaaacatcttttctttaagcagactctacggtgatgaaaaaatagataccttaatgaatgaacttagagtagcggatgaggatagaatatcatttaccaagtttgtaagggactcggtaagctatgcggtagcttcaagatttaagttagattatccgatggattatgagcttttaagagaaaattttcaaagatttgacagcatatccttaatgagccttggtgaaagtgtatcggatattagcggaaagattattgatgaaaccattcaaaaaagcaaagagcttgagcttcaaaaagaagttttaataggaaaagaagcgggatataataaaattaaagaagaattagaggaggtagaagaaaatgtatttcgacgagatgatcaggaaagaaatgaaaacgagcgagttctccgaaatggagagtacggacgagataatagaaaaaatcagggagaatacgctaaacagcttggaggaacagacggactttataaggaagtatccgaatccgacctacgcagtgatgaggctgaattacctttcacagagcgaggagcagagccacttcgagatgcttttggatctatacaaggagaagaagctgacaggacacctgatggatattcagaaacaggcagtagagtttatgagagcagagaagccaaagttgatagcagcttggaagatagaggacgagaacaatccgcagtatggggcgatgatttcagctctcaaagaaatgaccatcaaggaagtagtggagatttaaaagacaatacggataaagggataatagaagctgaaaaggcttctttttctttacccgaaaattcttatggacagataagccttactattccgctaactgagaaggatatagataccgtccttattaacggaggaaatcatgatggcggtaggcttcctgttattgctgagttttcaaaaggcaagagcatagaagaattgggagaatacctcaaagatacctttaaaggcggaaacggattttacattgatgaaagagaagtatcttcctggtattcggataaaggtattcatttagcttatggaacatcggcaagagaggataatacacaaattttaagttggagtgatgcagcaagtaggataaatgaacttcttgacagaggtgagtttgctacaaatgtagaacttttagaggcacaggactatgaaagggatagaatttcagaatccttatggtatctaacgcacgatttaagcgaagaaggaatagagcaaggatatttcaactcttttgaaagaggtggtggctttccgcaagaaacgaaaagattatctgaagcattaaaaaatcctgaatatctgaaagaaacaatcaaagaatatagcaggtttttagaaggatacaaagaaagcagaaatgtattaaggtatcattatcacaaggtagatagtctttatcagaagttgcaagaacttgagctgcaacgaaaggaatatagtaccaatctgacagaacttccgaaggtaaagctctttattacagaagatgaagtccttgaaagcctttcaagaggaagcggcgttgatagaggaaaagaacgaatcaccaagttttttaaagaaaatcatactttgcaggaaaaagccaatttcctaaaagatgaatatggaatcggaggacattctcacgttgtgtcaggtgcaatgggaagtgatgaatggcacgatgcaaagggttttaaattacagaagaatgattgtaatgatgtgttccttacttggacaagtgttgcaaagcatattgatgagctgctttctaaaaaactttattttgaggaaaaggaaacagaaagtacggcagagatagaagaagtaaaagaaccgcaatattattctaaaaatgatcctggaaatctaatgcctgatgaaattcttgaaagagtgccagagatttacgcacaggaggatgtagatttagcggataagcaggttcatgcagcatatattattccttttcgttcaaattggacttggtatatgacggagtatgacagggaaagcggtgatgcctttggacttgttcttggaatagagcctgaatggggatattttaaccttgaggaactgaaagaattaaatgcccagaggctcattttagaggattttccaaagacctttagagaacttaaagatatagagcttataaaacaaatggatgagcaggagcttcagtttgtctttaatggagaacttagctttgaagataaagtagagcttgaagcacctgaagaaacagaagaagctacaaagcgtggcacagttcaagctaccttatttgattacctcaaagaaagagaagaagtagaactgaatgaaaaagaggacagccttttagaagagtttgcagttaaagcaggcgataccgtctattttaatcatgaagaatataaagtcagagaaatttctaaaaatgaaatcacaggaagatatgatttgtggcttgatccggtaagaagtggaaaccatcaaattccgattgtagactttacagataatgaggacttgctgaataaaataagtcttgaaagaccgaactttattgtcggtgatgaagttaaatacaaggacaaaaaccataccataacacgctttgatgatatgagaaagaacctaaatacggtaacggtgaaggacaacaccgagtattttggcgggatgataacaagcttcgatgtcattccttatcgtctggaaagcgaccttgagagggtatttgaaaacctgacatataaacagccagagcagactactgaggaaactcaaataaggaaagcggaagctcataactttaaaattacagaagaaacgctccctgaaaagttaagtccaagcgaaaggttaaataataaccttgaagcaatttccatgcttaacagagtggagagcggacaaagagagcttgacagtacagctcaggaagttttagcaaggtatgtaggctggggcggactttccgaagtctttgatgaaagcaaggaaggtcagtggaaagaagcaagggcttttctaaatgagaacttatcacatgcagaatacgaagctgcaagagaatctactttaacgagcttttatacaccgaaaaccgtaattgacggaatatataagacgctttcggatatgggatttaaacagggaaacattttagaaccatcaatgggcatcggaaactttataggcaatatccctgatgaaatgaataagtccaagttttatggcatagaacttgactcggtaagcggtcgaattggaaaactactataccctgaaagtgaagtgcagattaaaggactggaagaaacctccttttccaataacttctttgatgcggttatcggcaatataccctttggagaatataaggtaaatgacagggagtataacaaaaataacttccttatccatgattatttctttgcgaaatccattgataaagtcagaaacggcggtattatcgcctttatcacatcaagtggaacaatggataaaaaggatgaaagtgtaagacgctatcttgcagcaagagcagagtttttaggggcaatcagacttccaaatgatacctttaagggcatagccggaacagaagtaacctcagatattatattcctaaagaaaagggacagtatcagagaaagagatgaggactggattcaccttgctgaagatgaaaatggtcttacctataacaaatattttgtagatcatcctgagcaggtactcggcacaatgcgtgaagtttcaggaagatttggaaacacacttgcgtgcctgccgaaagaaaatgccgacttaaaagagcttctgacaaaagcaagtgaagaaatatccaaaggatcaacttatgaagaaatagagcttttagatgatgaaatcacttcaattcctgcaacggatgatgtcaaaaacttttcctataccgttattgatgatgaagtctattacagagaaaactcccttttcatcaagaaagagataacggataagaataaggaaaagattaaggactatcttgaactgaatactgcccttaaagatgttatctacaagcagaaagaggactattccgatgatgaggtaaagaaagctcaagaaaagcttaatgaagtctatgacaacttttcaaagaagcatggctttataaataatttaagcaataccagagccttaaaagaggatagcaatttccctcttgtatcttccattgaaattcttgatgaagaagaaaacgtcaaggcaaagggggatattttctcaaagagaaccattacaaaagccaaagtcatagaccatgtggacacttcccttgaagctcttgtcttatcggtatctgaaaaaggctatgtggattttgagtatatggaaagccttacaggtaaagacagaccaactttgatagaagaacttagaggagaaatttatctaaacatcagagaagaacaaaacttttatagaccattatcctttaaccttgaagatggagatttgcctttcgcttgtgcaaacggcagtaattcatataagtacggctatgtaacaaaggatgagtacctaagcggaaatattagagataagattgccattgtagacagctaccttgcaaagttaagacaaacggaacgagagcttcctcatcttggctttgttgagaatggaaaagaaaaagagctgataagctatgaaatgaatcgtttggaatatcaaaaagcagagcttaccaaagttcttccaaaggaattagaagcaagtgaaatcaatgtgcgtcttggtgcgacttggataccgattaaagatattgaaaaattcatctttgaaactttaaaaactccgggatatgcaagatgggatattaaggttaaattttcaaatattacaagtgaatggaatgtagagggaaaaagcagggataaaggaaatgaccttgcagaaatgacctttggtacatcaagggtaaatgcctataagctgattgaagatgccctaaatcttaaagaaacaaaggtatttgaccagattataaatccggacggttctaaaacttctgtcttaaataaaaaagaaaccatgcttgcaggacaaaagcaggagctattaaaagaagaatttaagaactggatatttaacgatcaggaaagaagaaaccgtcttgtaaaactgtataatgagcgttttaactcaatccgaaacagagaatatgatggaagcaatctttcttttgagggaatgaatacagaaattgatttaagacctcatcaaagaaatgccatagcaagaagtctttatggaggaaacacattgcttgctcatgtggtaggcagtggaaagacctttgagatggtagcttccgcaatggaaagtaaaagacttggaatgtgcagtaagtctttgtttgttgttccaaatcacttaacaggacaaatcggtcgtgaatttatgcagctatatccgtcggctaatattatggtggctgataaaaaagactttgaaccgaagaacagaaagagatttatcggaaagattgccacaggggaatatgatgcggttgttatcgggcatacgcagtttgaaaaaatcccgatgagtaaggaatatcaggaaaagcacatccaagatcagattaatgaaatcgtaaactatgtagaagaatacaagcatgacagaaatcagaactttacagtaaaacagcttgaaaagacaaagaaaaaactggaaacaaggcttgagaaattaaatgatgattttaagaaagacgatgtaattacctttgaggaactgggagttgatatgctctttgttgacgaggcacataattacaagaacctttatctctataccaaaatgagaaatgttgcaggtatcgggcagtcagaagcctttaagtcctccgatatgtttatgaaatgcagatatatggatgaaatgacaggaggaaaaggcatagtttttgccacaggaacacctgtaagtaactcaatgacagagctttatacaatgcaaaggtatcttcagtatgagagtttaaagaaaaatcacttagagcattttgattcttgggcttccacttttggagaaacacaaagctcctttgaactatctcctgaaggaacaggatatagggtaaaaacgagattttcaaagttctataacttgcctgaactaatgagtatgttcaaggaagtagcagatattcagactgcggatatgcttaaccttcctacacctgaagctaattatgaagttattaaaactgagccttctgaagaacaaaaggaaatcctaaagagcctttctgaaagagcggatgatgtcagaaatagggttgtagagccggatgttgataatatgcttaagattaccaatgacggtaagaaacttgccttagatcagcgtttaatcaatcccctacttcctgataaccctgatagtaaagtaaatgtatgcgtaaaaaatgtatttgctatttgggataagacaaaagaaaataggtcaacacagctacttttctccgatatgtctactccaaaaggagatggagaatttaatatctatgatgatattagagaaaaacttgtagcaatgggaataccgaaagaagaaatcgcctttatccatgaagcgaattctgataagcaaaaggatgaactctttgcaaaggtaagaaaaggcgaagttcgtatcttaatgggttcaacgcagaagatgggagccggaacgaatgtgcaaaataaactgattgcacttcatgatttggatgtgccttggagaccagctgatcttgaacagcgtgcgggtagaattgtaaggcagggaaatgaaaatgagaaggtaaatatctatcgttatgttacagagaatacctttgatgcctacctttggcagacgatagagaataagcaaaagttcatttcacagattatgaccagtaagactcctgttcgtgtggcagaagatgtggacgaaagcagcttaaattacgccgaaattaaagcgttggcaacgggtgatccaaagattaaagaaaagatggatttggataatgaggttacaaaacttaaaatgcttgaagcaaactataagtctaaccgttacagattagaggataaggtggcaaaaaactatcctgaagaaatcgcaagaacagaaaagctcatagaagctgtcaaaaaagatatatccaatgtagagcctaaagcggaaggtgaagaaaagtttacttctattaccattgcgggagaaaaaattaccgataagaaattagccggagaaagattacttgaagctatttcaaaggtaaaaatcaatgaaagcaaggttataggaaagtatagaaatatggatttagaggtaagctataacttctttactaattctcataatttcagcttaaacggtgttgcaaagcatttaggagagcttggaacaagtgcggacggtaatatcacaagactggataatgcccttgagaaaatgccggagaaactaaatatgcttgaagaaaagctcataagtacaaaagaacagcttgaaaatgccaaagaggaattaaaaaagccttttgaaaaggcagatgagttgaaaactaaggtattaagacttgcagagttaaataagctgctcgatatgggagaggtggaagaaaagaaaaatgataatcctcttgtggaagatgtaaaaagagcaatcattgacttctgtaacagagagtatgaagaaaatcacagttatgatgagtttcatactctatatcctgacttaaagcatatcggtatcgcctataccaatacaccggatgaaagacatggtattcaatatgagcttaatttagaggagaaaacttggacacagtacattgatgatacgcctattaaaacagagagctttgattatgaaaataagggagaaaatgaagctctaagaaatatgaaaaatgaaattgagttatctacatttagtgatttggtttatgttgattctgaagatttaagagtagcaacgggacttgatattgacgatgagggtaacttctatgatccgtttgcaaaagaccttgataatgacggtattccggatagatatgatagtgattttaaggacagtgattattttgagtcaacttatgatgtggaggacaatcttcatagcaaagaagaaaccacacaaaaatcagatgataagccgtctatcttaggacagataagagcctatcaggaagaaagtaaaacagaagaaaaacaaaaaataaaagagcaggaatttttaagataaagggagggcaacctcccttttaccatgaaaggagataaaaacatggattacaaaacaatgagagatagagttgaagatatgttaagtgataatcataaagactttgttaaagcgattataagcatggaaaagggtatcaatgatgaaagtgctttagataagctatatgacgcttatatggacaatgatagccttaatttgctgcatgaggagtttgactatatgattgaggatttaaggggacaggggcagataaaagacctgctttatgttcgggaagaaaaggataatcttatcaatattgtcggaaatatcgttggagaagttgatgtaattgaaagggaaaataagaacggagaaacctttaaggtagcaaacttctccgtagtatctaaagatgatgagggaaataagttatatcacaactgctccgtttatggagaaaagagtgatattccaaaggactttaagcagggagattttgtcaaactctttgggcagatcagaacttccattgatgataacggcaaggagcatagcaatatcaggatactttcttcaaaactgttaaaggcaaaggaacagatgaaaggacaggaagaaaagaaagaatctatacttggagctatcaaaaaatatcaggctgaagataaggaaaaaccgaaagaaaagaaagaagcaagcaaagaagctgagagataaatttacggtcggtgtggtcttaggactgcaccggctcttttttatttatgcaagttcgattaaagagaatatatttatgaaaaaagtatattttgtggtataatatactagatatagttttcttgaacggaggataagaatgagggtttttagttataaaagattgttcaaaaaactcattgatttagatatgacaaataatgaattgatggaaaaggcaaaagtgagtaaaagtacattttacaaaatgaagaatggacagaatgtaactacggatgttttgcttagaatttgtaatgctttggattgtgatattgaagatattatggagtgcgtaattattgaagatgtaaggagaatgggagtctaagtttacagtcatagatttattttcaggagctagaggatcataaaacttattgttaaattattgcttgaaaaaatattaagggatgtagcataaaaaatttatgattgtgattaaacaggaaactcataactgtatttatatagttatcaatatttatattctaaaatcatgatttttatattagataaagaagggggataaaatgtcaattaggaaattaaaaataaagaattttaaatgcttttcagattggtttatagttgattttgaaaatgggattaatatattagttggcaataatggaacaggtaaatctacaattttggaagctattaatctggttttaactggaacttatcatgggaaaaatattaggaatgaacttactcagtaccttttcaataagaatatagtggaaaactatattagagaagtcaacgaaggagtgaatgtagaacctcctaaaataattattgaagcgtattttgatgcagaaatgccaagttttttaggtgatggaaattctgaaaaaactaaagacacccctgggatttgtttatcaattagttttgatgaaaaatatagcaatgagtataaaatgctttgtaagaacaagataacatcgttgccaattgaatattatgaggtaagttggatgtcttttgccagagaaaatataactgcaaggagcattccaattaagtctgcaatgattgatacgacaagctatactcctaccagtgggtcagatatatacatatcgagaatagtaaagaatctgttagatgataatgaaattattaatatatcgcaagcgcataggcttatgaaagaacaattttctagagatgagaatattgctaatataaatagaaaattaacggaaacatcaaataacgaattgacaatttctgtagatttcggtacgaaaacttcatgggaaagcagcttggtaacccaattaaatgaaataccatataataacattggtaaaggtacacaatgtattgttaaaacacaattggcattaagtgatcataaaatagaaaataagcagattgtgcttttagaagaacctgaatgccatttgtcatattcaaacttaaatattctcctagataaagtaaatgagtcagtaaaagaaaaacagataatagttactacgcatagtagttttgtatcaaataaattaggacttgaaaatttaattttactaaatcgaggaaaaacactacggctaggtgatttatcaaatgaaacaaatttattttttaaaagaattgcaggttatgatacgttacgattattattatcaaataaagcaattttagtcgaaggtgattcggacgaactaattgttcaaagagcatatatggactctcataatggtaaattgcctattaatgatggaatagatataatatcggttggaatttcttttttaagatttttggaaatcgcaaaattgctagaattacgtgtgtcagtgataaccgataatgatggaaatattgatgcactaaatagaaaatatagcgattatttaggagataattgttgtgagaatataaatatatattttgatgatagtacccatgaatataatggttctttggaaaattacaactataatactttggaaccgtgtatatatagatcgaattccatgtctattttaaacgagatattgaataaatcatatgaagatccagatgatttacttaaatatatgaaggggcataaaacagaagttgctttaaagatttttgaaagtgataaagctatagaatttccacaatatataaaggagggtattctaatatgagtgggaaattatatatagctgctgctggatctggaaaaacaagaaaaattatagaggattctcttaatactcataaaaaaatactaatcctaacatatactattacaaatgagcaacaaataattagccgaattaagaataaagttggtgtaattcctaataatattacagtttctacatggttttcttttttgttaaaagatggtattagaccttatcaaggaagtagatttaaggaacgaattgaaggaattatatttgtaaatggacagaacaatacgtacgtaaagaaaacatccaacaaatattttgccaaagataacagggtatatactgataaattatcagagtgtgttgtagagttaaatgataaatgtaatggaaaagtttttgaaagaatcagtggaatgtatgactgtatatatgttgatgaagtccaagatatggtggggtatgatttggaaatattaaagtgtttaatagcttcaagaattgaagtgataatggtcggggatcctagacaatgcacatattcaactcactcatcaaaaaaatataaaaaatatagttgtgggaaaatagatgagtttttaaaaaatgagtgcagaaaattagatgtaagaattgatgaaacgacacttaattgtacttatagaaacaatgatattatatgtaaatttgcgaatagtctgtatccagagagaacatctacaaattttgtgcgtagagctgaagatgaatcagatggtgttatgataattgataaagcagatgtagagaagtatttgcagaaatttaatgcaatgcagttgagagaaaataaaaggacatccgtcaataatgaatatccatattataattttggagaatcaaaaggcttggaattccaacgagtacttatatatccgactcaaccgatgtgggattggattattaacaataacacatctctaaaagaacaaagtaaggctagattatatgttgctgttacacgtgctgagaatagtgttgttattgtacgtaaagatgcacgaccttgtagtctaccagtggtgaaattataacttttattgtgaggagatgaaatttaaatggctaatgatataaaatttgaaatttctgttccagcggatgaagagggatatgttcaattaaaatgtccaagttgtagtgaaaaatttatgttaacggtggaagatattgaggctgaaagcacaatagatatttggtgtcctaattgtggtttaacacacgagaattatttagacgatgatatttatgaattagcagaacgaatagttgaaaatcaagttgctgaaatgctaaatgatttttcaaagaatcttgaaaaaagttttaggaatagtaaaagtataaagtttaaacgtggaaaagagattaaaaaggaagcagaacttccgataggaagaaaaactggagattatgaagaaaagaaatatttgtgttgtggcaaaaccgctagaataagtagtataaaaaaattagaaggtagttattgcccgttttgtggagagatgatagatggagattagtaaaaaagaacttagaaaaatcagtagaaaatttaggatattagcttcaaatgttatgaattcatattatggagaacagaatgcaaatttggaagaaatgataaattatatagagcaaacattgttgataaaagagtatttgcatagtttagaatatgatgttgatggcttagatgacttattaaatacgataagtaattcttatggacgtaaagttttgaatcttggcaatgatagtaataaaaggacgtatctactgtatagagcattttcctttataacaggaaataatctacctacatatacttttggctggtattatgctggcagtaataaatatcaagatatggcaaaggcgtttggcgatagaatggtctatccgtttgtacttgaggttgaaaattatatgaaagatatttctaccgatatggggtacgatgaaaataatgctctatataatatcaatgttaatagttctggagttcaagtcaatattgcggaacacggaagcacgattaacgctgaccaagaaaataaatttaatactgaagaagtaatcaaggcaattaacaatgtagaagacttaattaaaggtatggaggatgataactccaaatcaatacttaatcagaatttagataatataaaaaatgaaattaagcagaagcatccgaagaaagaagtattgactacttgtttaaaaagtatgcattttatcactacttccgtagctttaattcctgatttagctttaggtataaaaatgcttgcatcattgataggcatttcaatttaatattataaaaataagaaagctatataatattagagttatcgttccatctccttacccatgtaaattccatagttctttcgtatttgataaagttcgtccatagtagattttgtagaagaatactcttgaataagggtattctttttttcttgcagtttattaagtttatctaaaatatcctttgaattcggcagctttgaataggatttttttagctttgaaagagctatttcatagtgtgtaatttcagccttatgctcctcaaaaaatgctttatcggaagggtttgctttatattctttgtagtaggctcgatattttttaacagtatgaacctgctccattgtatcggaaagtagctgcatatccttgtcaatttctttcattttatcttgtaagtcttgtctttcttcagcacttttttgaatgtatttatcaagctgcttaatggagttaatgccatgttctctgataaaaataactgactcagccattgtatttaagttatgtttggttgcccaatattcatagcctttgctctctttcactttggcattggcattcatattgatgatatttccgattcgtcttttgacaggtggagttgtaatagattgattttctgtaatacgctcttttaatctttcttctgtatagtcctcaccaatcgttttagctcttgtaaatcttgtcttatcttttggtttaaaggctatgtgtttcccatactttatttcataaccaagctccgccattttttttagaaattcttcccaatacttagactgttttataagacgatcaatgtcaaattgaagtctgcttttccaagaagtacctctcttagattgctcattttcataccatgacttgccatttgttttgtactttctcttatagctttcgtaaaactcatcaatcacagaaaggttgttttctttgcatagcttatcgctttgatacctgattttgtggtagcttttcttgttggattgatagcacttgcctgttaccatattcacattattgaagatgatatggttgtggatatgccctttatctatgtgggtagataagacaaattcgtactcgtcctttaatatctttttacacagttcaagaccgatttgatgtgccattttaggacttgcttctccgggtaaaaaggattgaataaggtgtctggcaagaacagttccgtttgttccaacatcatttcgtgttcttaaaaactgggtatgagcagtttcttgatggcatttatgagtgcttactaagatttgctcatctgttttttttccattaacaatatatgaaatggcaagattaagggttgattttataggatgtatttttgttatagccataagatttaatcacctccagaagttctgttaagaagcagagaatgtatttgccacaactcttttgagaaatattcaatctgctttttcatatcgtttatatcgtccttatagattatgccggtggaatttacacgctttgcaatctgattgatgttgcttgtagcattggacagtaagccctgtaaatctctaaacggttctaaatccacttgatatatttccttttccaaaacgcatttgcggataaagtggctcatatttctgcaccttgcgagctttcgtttctcctcaaaaagagccttttcttcttcagttagtttaatttccagtctttcatttcgtattctatttgccataggtaaatcctcctttgaatgtatttcggggtcttagggtataccctaacaagttaaaaattgataaaaaaagaagcatatcccagagggctgcttcatcaattttttcgtaagtgtccgtacacttactgtgcttgctcatatactaatcgatcatatactaatcgtgtaagaacaactttaagcataatatttatattattataccatagtttggaaaaataaaaaattatatttcatcaacgtttcataaaaggtgtgtagaatattattgaaagtagttataaactgctattgtgtaaaaataaaggaggaataaaggaggaaaaatttatgaaaaaaatagtatcaagaggagcatgcctattacttacgttatgtttgagcttaagtacagttgggtgtaaaaaaagtaatgaaagcaataaaattaaagaaggacaatctataagttctgaagaggcaggtatgtcaactaatgagaaggataaaaatgaaacatttaagccatcagattatactttaaaaacaaaaaaagaatatgtttatgaatatttaggtcttaaatttaaactttcagacaaatttaaaaagtatatggatgataaaaagatagcgatgttagatgatcaaagtcctatagataaagaactaaagtatgctattttgacatttgaaaaaatgacagaagaacaaaagaatgcagttatagaaaagatgggcgatggatataaaaattggcaaaatgagcttgaaagaattgggactattggtatattcgaaaaaaatacatcagaagaaaaaatatctaaaattacaaaatgtgatactcatactaaaataggagtttcaagtgatggaaaatacgattgctatttaagcacaaatagcggagctgaaagtaatcttctggatgaattaaaaagaactgagattcaaattatagataaaaaagaacgtcctaaaaatggttttgtgctatcagaaaaaactgatttagaaaatacagaagcatttaacaaagaatcggttaaagatttacgtaaactatcaacaaaggacataaatggcaaggattttacaagtaaagattttgagaagtatgatcttactatggtaaatgtatttgcaacttggtgtacagcttgtgtaaaggaaattcctgatttggttgaggttcagaatgaaatgaaaagcaagggtgtaaatatcgttggagttgttacagatactgttgatgataacggtgaaaacaaggaagcaattgaaaagtcaaagttaatacatgaaaagacaaaggcttcatatcctttcttaatgccagataagacaaactttaatggtagattgaatggtatacaggctatgccagagactttctttgttgatagtaatggaaatattgtaggtgatacttattctggggcaaagagttcaaaggaatggaagcaggtaattgaaaaagaattggaaaaaataaaaaataaataaaagtaaagcggtgattggtatatggttaataagtttttaaaaagccgtgccttgtctttattaattatctttattagtatggcgatgatttactatggtcatagtaatggagaaactaaagttgtcttggataaggcgataagaatttgtatggagtgtattggaattggatagaattaaaaatattataaatggtagtacaaaaaaagataaatataaaataagagatcgttttaggcatttatttcaatccgtttggtttttaattactaattcttactttgaagggtttaagactggtaaaatctacggtgggaatttaaagaaaatttgtgttccaggtatgaattgttattcatgcccgggagcaaaaggttcttgtccaataggatcactacaggcagtaattggaaattcaaaatataagattagttattatatagttgggattttgttttttataggagcattggtgggaagatttgtttgtggatggctgtgtccatttggattgattcaagatttgctacataagattcccttttttaaaaaagttgaaacatttaagtttgataaacatttgagaaaattgaaatacataatattacttgtatttgtaataatattacctttatttttggttgatattttaggtcagggttctccgtatttttgtaaacttatttgtccgattggtatgctggaaggaggattaccacttgttttattaaataaaagtatgagaaatgcgataggtttcttgtattattggaaaggaatcattctaatagttactttgttactttctataattatatatagacctttttgtaaatatatatgtccacttggagctatttactcaatttttaaccctatttcaatatttagatatagattggataaggataagtgtattaattgtggaaaatgtaaaaaagtttgccaaatgaatatagatccagttgagaattgcaatcatctggagtgtatcagatgtggacgatgtaaaaatgcttgtccagtggatgcaattagttatggagtaagaaaatagagaggagtagttaggaaagtgataaaaaatgctatagcatatattacaagaaagagaaatagaactttaataatttttatcatattaactatagttctttcttgcttgtattcttgtttaacaataatgaaatcaagcaatgaaatagaaaaggctttatatgaaagttctaattcttcaatatcaataacaaaaaaagatggtaaatattttaatgttaatcaatttaaagatattgaaaaattaaaagaaattgaagaaaaaataattcaatatgatggattagcaaaactaaaagatgctaaagtagttagcggagaacaaagaataaatagagaagatttatctgacgaatttaagaatgttgtttcactcgaagctacaaataatactaaaagaaatattttatttagtagtggagtatttacaattaaagaaggcaaaaatataggagaaaatgataagaattcaattattgttcatgaagaatttgctaaacaaaacaatctaaaattaggtgatgaagttgatcttgaattactagatattgaaaaaagtggaaaaataaaaagtcataaatttaaaattatagggatcttttctggtaaaaaacaggaaacatatacaggattatcttctgattttagtgaaaatatggtgtttgtagattattcaacaagccaagagatattaaataaatcagaaaataataaaatcgcaaataaaattttaatgtattctggtagtgcagaatctacagacttagccttaaacaaattgaaagagcttaaaattgatgagtcaaagtattttgttgaaaaagattctaatgcgtttgaagagtctttagagtcagtgagtggaataaaacatataataaaaataatgacttattctattatgttaggtgggatggttgttctttcattaatcttgattctatggttaagagaaagaatttatgaaataggtatatttttatctattggaacatctaagatacaaattataatgcaatttatattcgagttaatattcatatcgataccaagtataatatcttccttatttttaggaaatgtattactaaaagtaattgtagatggattcattaactcagaggactcaatgatttccggtggaagtttaataaataatagtagttttatgttaaatataacaacacttggacaaagttatttaatattaataagtattattgttttatcagttgtatttgcttcttcattaatattaatcaagaagcctaaagaaatattatcaaaaataagttaggagaaaataatggatatattagaaataaagaatgtagcatatagttatgcaaattctaaagaaaaagttttgtcaggagtaaatcaaaaatttgaacttgggaagttttatgcgatagtaggaaagtcaggaacaggaaaatctacacttctttccttacttgctggacttgataaacctcaaacaggaaaaatattgtttaagaatgaagatatacaaaagaaaggatatagtaatcatagaaaaaataatatatctttagtatttcaaaactataatttaatagattatttatcaccaattgaaaatattagattagtaaataaatcagcagatgaaagtatcttgtttgaactaggtttagataaaaaacaaataaaaagaaatgttatgaaattatctggtggacagcaacaaagagtagctattgctagagcattggtatcagatgctccaataatactagctgatgagcctactggtaatctagacagtgttactgctggagaaataattaatatattaaagacattagctaaagatagaaataaatgtgtaatagttgtaacacatagtaaggaagtagcagattctgcggatatcattttagaactaagtggtaaaaagttgaaaaaagtaaataaaatgaatttggaggttgaataatgataaaaaatgcatttgcttatgtaactagaaaaagcttaaaatcattaattattatattagttattttatctatgtcaactttaagtctcattagtttatctattaaagatgctacggacagagcttcaaaagaaacatttgctaatataacaaatagtttttctatggagataaatagacaagtaaatccaggaacacctagaggtgggggaaatgtaaaaggtgaagatattaaaaagatatttcaaacagatagtatagactcctatgtaaaaagaataaacagtgttgcagatttagttgattatgatattattgaaactcaagagactcttgcgaatcaatcacctgaaagagcgaagaattttaaaagaacagttatgttaactggggttaacgactcatcaaaagaaacaaaatttgtatcagaagcatataaattagtagaaggaaagcatttagaaaatgaagataaaaataaaatcttaatgcataaagatttagctgaaaaaaataatcttaaagttggagataagataaaaataaaatctaatttatttgatgctgataatgagaaaggtgcagatgaaacagtagaagtagaaattaaaggtctattcgatgggcataatagcggtggagtaagtgcagcacaagaactatacgaaaatacattaatcactgatgttcatacagctgctaaagtttatggtaatacagaagatacagctgtataccaagatgcaacattctttgtaaaaggtgataagaatcttgatagtgtaataaaagatcttgggaaattagatataaattggagagaatataatttgattaaaagttcatcaaattaccctgcattacaacaatctatatcaggtatctactcaatttcaaataaattatttgttggctcattaatatttgcaggagttgtagtttcattattattattcttatggatgaatgctagaaagaaagaaatagcagtattactatcattaggtatatcaaaattagaaatttttggtcaattcctaattgagatggtatttatatcaatccccgcattcgttggttcttatttcttagctcaatatacagctgataagcttgggaataatatattgaataaggttactggtgatatagctaaacaaatagctagacaatctgcatctagccaattaggtggtggggcagaagctgaaggatttaacaagacattatcaagtttagatataaatgtattacctaaattcataatttatgtagttatatttatgagtttagtacttcttgtatcattgattatttcttcattcaatatattaagaaggaatccaaaagaattattaattgacaataattaaaattttcggtgctttttagcaccaaaaattttttggcttttaaatatcaaataatatgctgtataatataagtgtagaggcttaagtggaggtatatatgaaaatattaactgttgaagatgataatatgataagagagggaataagtgaatatctttcagaatttggatatactgttattcaagctaaagatggaagagaagccttgtcaaaatttaatagcgatataaatttggttatcttagacattcagataccttttataaatggtttagaagtgttgaaagaaattagaaagaaaagcaatttaccaattctaatcttgactgcatttagtgatgaagaatataaaattgatgcatttactaatttagtagacggatatgtagaaaagccattttcattgccggtcttaaaggctagaatagattctttaattaagaagaattatggacatttagagaagtttgaatataatgatctatcggttaattttaatagctatacagctaaaataaatggtgaagaaatagatgtaaatgcaaaagaactagaagtattaaaatgtttattggataataatggacaagtgttaacaagaatgcaaattattgattatgtatggaaagatagcgaagaaactccttatgatcgagtaatagatgtatatataaaagaacttagaaaaaaattacaattagactgtataactactataagaaatgtaggatataaattggagagaaaatgaaaaaattaaagatatttccaaaaatgttcatacaaatattttctgttcttggaataataattatattagttcattcattagttttttttatctttcctaaaacatatttggagacgagaaaagaaaagattcataatatggcaaatgaaatttctagtaatatgaatggaaaagaaataaaatatatagaacaaactttggagctttattctaagagtagtgaaataaaagcatttataaaagaaaaaaataataagaatgaaatacaaatcaaagataatataaatgttaatttagaaagtgatagtaattctttgataattgaagaaagagaaataaagcttaatgatggtaaaaaaacaaatctacaatttgtttctacagctgatatgcaaaaagatgcgaaagatttaagccttaaatttttaccatattctttattaatatcaattttattttctgctattatttctttaatttatgcaaaatcaataaaaaataatatacaagaaataaaaattgttactgataaaatgatgaaacttgataaaaaaacgcgtttaaaagttagctctaatgatgaagttggagaattaaaacaacaaattaatgatttgtattctactttattaagaacaattgacgatttggaatttaaaaataaagaaattttaaaattagaaaagttaaaatatgacttttttaaaggtgcatcccatgaacttaaaactcctcttgctagtcttaaaataatactggaaaacatgaaatacaatattggaaaatataaagaaagagatatttatattaatgaatgtattgaaatcgttgatagtttaacaaaaaatatttctcaaatattatcagttcattctatagaaaatttgaataatgatgaagaatatttgaaaataaatgatacattagaagacatattaaaaaagtatgaaatattagcaaatcaaaagaaaataactgtcaataattatatattagatgagaatgtttatataggaaaaacagctttaaagattattctatctaatttgattagtaatgcggtaaaatatactgatgtaaatggggtaattaatattgggatagttaatgattggttatatatagagaattcatacggtaacaataaaatttcgaatatggataaaatatttgatgttaaatttgatttaaataaggaaaatagtaatggattaggtttatatattgtaagtaatattctgaataattacaatatagaatataaagcattgcaggatgaagaattttttatctttaaaattaaaatattttcttaaacaagatataattttgcaatagttattgaaaaatagagacttattattagccatggaagtaaaggcttttttcttattgaaagtgaacagaaaataattgatacaagaaatcaggatttgaacacgctaatgaaaatattgttagtaaaactatatgagttagtcttttcggatgcagagactgtttaaatatttgatagaatagaaacttaaaaagtttaataaaactcaattatataagtagtagatgaatatgatggttatttagattattgataaaatggaggaaataaatatggaagcatctaaacgtttaatgttagaaatatttagaattcaatacattcctcttttttataatatgtatagtagatgattgtttcaggtgcgaattgaaacaatcaagttcatataaagaaatatttttattctttcatttcagaggacttcttatgccaagatgcagaagtcctccttttttatctgaaaaacaagcagataaaaaagagatggaggaaactttatggcaaaagagtattatctttatatcagaggacaaaaggtaaaagtcagtgaagatatatatatagtctactggcgagaaaaagaacacgagaagtatttagagcaggtggacaggaaaaaccacttgctctttttttcagcattggatcatgacggacactttacagataatattgttgatgaaagtgttgatgtagaaaagattgttgaaacacagatgatgattgaagcagtaagaagtgctataacaaggctcaatgcagaagaaagagatattattgaacgcttgtatttcaatgatgaaactgttcgttcagtagcaaagctcaaaagtattacacatccggctttaatcaaaagaagaaacaaaattcttgaaaagctgaaaaaatttatcgaagaactttaaaactttggtaaccaaagggggcaaattttccttatgtaaagtgaaggggagtttgacctcctttactttcttgagtaggagatacgcctgcttatggcaaataggaaaatgtaaagaaaacagtccctttcaaatattgatctttgacaactgaatagaccaaggtaggactttatctacttactgagagttatgacctacgccaagacttttctgctgatgaaaatcggttcaaatgaataccggcataatgccgaggttagaagaaaatgagcgatagataggaatacataaaagataagcgtggcagcttatttcgatgatgtaagtggtgataatgatacttcaatagtttaagctgcctcgtctgaaacaaggggcggaggtgagattcctatgtagcagccaatgcacctaccaatgtcataaaacttagtaagaaaaataatatttggttataaagaatttaaagtggaggaggtgtattagtggataatgactggaatggattggctgatttgatagcaaatctgattacaaaatatgctggagttttagatttagagaatcttccaaatcctactccagtaaaaaatacagaggataagaataaatttgatatagctaaaagcacggattgagaaagagaaataaaagtgctataatatacttgagattaaagtccaaacctttattggtaaaaatatataaatatataataaggatattgaggttaatgctatgtcaaaagaaaaaataaaagtatatctctatacaagagtatctacatccatacagatagatggttattctttagaggcacaaaaatcaagaatgaaggcttttgctctctataatgattatgagattgttggtgaatacgaagatgcaggtaagtctggaaaatctatagaaggtagagttcagtttactcgtatgatggaagatataaaatccggaaaggatggagtgtctttcgttcttgtatttaaactatcgagatttgcaagaaatgctgctgatgtactttcgactttacaaataatgcaggattttggagtaaatcttatttgcgttgaagatggaattgattcatctaaagatgcgggtaaattgatgatttctgttttatcggcagtggctgaaatagaaagagaaaacattcgtgtccaaacaatggaaggtcgcattcaaaaggcaaaagagggtaaatggaatggtggatttgctccgtatggttatcaacttattgatgggaaattgataataaatgaggaagaagcaattgcaataagaactatttttgatcaatatgtaaatacaagtattggagctaatggtctttctaaatatttagaaaatcatggtataaggaaaataccaagacaaaatgggaaaaatccattgtttgacgcaggtcttataagaaaaatattaaagaatcctgtgtataacgggaaaatagcatttggaagaagaactttagaaaaagttcatggtacaaggaatgaatacagacaagtagagcaggacgattatttagtagcagaaggcattcatgaagcaataatcccagatgaattgtggcaggctgcacaagttaaactgaaagcacaagctaaaaagtatgaacatgtaaataagggcaagaacatgaggacacacttattatcaggaatagtaaagtgtccgatatgtggagctggaatgtttgggaataaatctataaaatataaaaaagatgggacgaagtataaagacttctattactatggttgtaagcatagacttatgaatagaggacataaatgtacctataataaacaaattagagaagaattgttagatgatgccgttgctgaggtaataatcaagttagtaagcaaccctaaatttgcatctatgatacaagaaaaaattaacatgaaggttgatacatctgctattgaaaatgagatagataattaccaaaatgaactaagaaaaagtcattctacaaagtataagcttattgaggaaatagataatttagatgtagaggataaacattataagagaagaaaaaatgatttagatgataggctttatcgtatgtacgataaaattgaggaattagaaagtcagttaatagaagctaaagcaaaaaaagaaacgatagaggttgagaaacttactggtgataacatatataaagtattgatttattttgacaagctttataaagtcatgaacgatgttgaacgcaggcagttaatagaagcactcatttcagaaattcaaatttatgaagaaaagcagcctaatggacaatggctaaaatccattacttttaagctacctatcattgatgaagatcttaatataagtttggaaaatgatgagcaagttgatggagtatctgtaccaggagtagaccctaatacaggttttccacttccagatattggaggaggaataggggttgaagtaacttttgatgttgtggttgaaagtattcctaacccaaatcctactaataatatagctactatagattactcctatacacctgtagaaggcggtataccaaatgatttttcagtagattctaatccagttcctgttgaagtaatctcagcagatgttgaagttacaaaattatctgaacctactatagtgaatccaggagaggaattaatatacactataaaagtagtaaataatggaccattcccatctgagaatgtggttttaacagatgatgtaccagcttctattataaatccagagtattcattagatggaggagtaacttttcaaccatggactggaagtttaaatatagggacattagaagtaggagagacaagagttattataattaggggtattgtaaatccatcaacagtaggaattataacaaatacagctgtagtatcttcaactacagcagacccaaaccttaataataatacatctacaatagagacagaagtgaatttattagcagatattttagtaatgaaaacagcagaacctaattcagctgttccaggtactttattgagatatactattcaagtagaaaacttaggaccagcaaatgctgaaaatgtaatattaaatgatgatattccagcctctattataaatccagaatattcattggatggaggagcaagttttcaaccatggaatggaagtcttaatataggaactttaaactctggaatttcattaacagttttaattcaaggaacagttagtttaaattcttcagaatatatagtaaatacagcaacagtttcttcaactacacctgacccagatttaagcaacaatatatctaccattattacaccagttaacccacaagcaggtatttctattataaaagtagctgacgaggatgtagctgttccaggagaagaatttgtatatacaattgaaatttttaatgaaggaccatctaatgctacgaatgtagttttaacagatgatataccagatgttattttaaatccagaatattcattggatggaggagcaactttccaaccatggaatggaagtcttaatataggtacagttgcaccagggcaattaataagaattatcataaagggattagtaagttcaactgctacaggagatattactaatacagcagaagtaagtgcagatgtaccagaaccagttacggattcatcaacagtgacaactcctatagttccatcagcagatatagaagtaataaaaactagcaatatggatacagcagttccaggagaaacttttagttatactataacagttataaatttaggaccatctgctgcacaaagtatcgttttgacagatgatataccagatgttattttaaatccagagtattcattggatggaggagtaactttccaaccatggaatggaaatcttagtataggcactttggatgctggagaaataagaagtattataataagaggaacagtgagccagacagcagtaggtacaattataaatacagcaacaataagttcacctacacctgacccaaatccagataataatacttcaacagatgaaacagatataagtccattagcagatatttctgtgataaaaggcaacgaaccagttgctataccagggggaagatttatttatggaattgaaattgcaaatgcaggaccatcttttgcagagaacgtaactttaacagataatataccagcttctattttaaatccagagtactcaatagataatggagtgactttccaaccatggaatggaagccttaatataggtactttagatgctggagagataagaaatatcataataaggggaacagtaagtcaaacagcaataggtacaattataaatacagcaacagtaagttcaactacacctgacccaaatctaaataacaatacttcaacatcagaagcagaggtaagttcatcagcagatatttctgtagtaaaacgaagcaatcagactgttgttgtaccaggagatgtactagactatacaattgaggtgagaaatgcaggaccgtctactgctcagaacgtaactttaacagataatataccagcttctattttaagtccagaatattcaatagataatggagtgacttttcaaccatggaatggaagtcttagtataggcactttagatgctggagagataagaaatattataataaggggaatagtaagtcaaacagcaataggtacaattataaatacagcaacagtaagttcaactacacctgacccaaatctaaataacaatacttcaacatcagaagcagaggtaagttcatcagcagatatttctgtagtaaaacgaagcaatcagactgttgttgtaccaggagatgtactagactatacaattgaggtgagaaatgcaggaccgtctactgctcagaacgtaactttaacagataatataccagcttctattttaagtccagaatattcaatagataatggagtgacttttcaaccatggaatggaagtcttagtataggcactttaggtgctggagagataagaaatatcataataaggggaatagtaagtcaaacagcaataggtacaattataaatacagcaacagtaagttcaactacacctgacccaaatctaaataacaatacttcaacatcagaaatagatataagttcatcagcagatatttctgtaataaaattagcaaataaaacagaagcatgtgtagaagagcaaatagattttgtaatagtagtatcaaatgcaggaccagaaaatgctcaaaatgttactttaatagacaatgtttcagataagcttaagaaagcagtattttcacttgatagaggtgtaagtttccaaccatggactggaagtcttaatataggtacactaccagctggaactttaagagttattctattaagaggaattataaaatcaacatgtcttgatagattaacaaatattgcagaagttacttcaacaacaccagattcaaaccttaacaataatatatcaagagtgcaagtagaaataaaacaatgttgttgtaatgattgctgttgtaacaactgtagtaattgttgttgcaatgattgtggttgtaaagattgttgctgtaattgttgtaaaaatgacttttggtgttgattttataaaataattttgtataccttaaattaaactgaaataaaaaataaattcacatatgagtaaaatattttataaatattaataaattttctatctttgatatggaccacattcgtaatactagttattaaatgaagtggtcctttttaattcattaaaattatttattctaattaaattttaaatgtattaaataattttaattttttataaaaaatattcatatattctttatattaaagtttagatatctaaaaatacttttagaatttattatattatgttaatttttttatatcttataatgattatatttttctaactataaaaatagtatttacttatatttaaaaataaaagaattttattcctattgtgtaaagtgagaatactattttcttatattggtataataatagtaaatctataatatagaaaagaggtatttctagtatgcatgaaaataaaaagaatctattagacggaagcttagctcaatataatgatacagcagttccaaaaataccagtatttgctggtaacgatataacttcagaagtttattattttaaacctaatcaagttcttaatgctcatagacaccctaatggtgaacaaatatttgtgttcctaaaaggagaaggtaaaatgaaacttggtgagcatgaatgtgatgtaaaaaacggcgatactgtatttgtaccaacaggagagtggcatgaaattactaatggaagcaatgaagaaatggtagccgttcaaattacaaaaattaatgctggagcagaatacagaggatagatatataagtacagttagtactttaatatctattttattatataaactttaatctcaaatataaaaagagtcttttaaaaggctctttttatatttttgttaattttcattataaaaacaagaaaatatctagctaaaactaatatattttatttaatattttttatagcattgtttgcaaactcagtatttacgatatctttataaggtgcttccttatctagttctttagcttctttcataacagtcatcaatttcttcaaaccttcctcctttaatacaggattttgagaccatgcatctattgatttatatctatctacaactgttgttaaatcttctaaagatatatcttcaaagaaaggttgcatagccttagctacttctttgctagatgcttgttgaacccataattgacctttataaacagcatttgtaaatctttgaattaaatctttattgtttttcatgtatgatctcgtagtagagtatgctgtaaaaggtatttctccagaatcttttcctatagatgtaactatatatccactaccttctttttccattgctgttgctgtaggttcaaatgctgttgtaaagtcaccctctccacctgcaaaagctccagccattacaccaaattgtacatcagttcttacattaacattgcctgcttttagattttctccaatagtaagacctttttcttttagaacatattcaaaagtcattagtggaactccaccttttctaccacctaatatttctgttccttttaaatcattgtaagagaaattaggcatttttttcctagcaactagaaaactaccatctctttttgtcaattgagcaaagttcactgcataatcgtttttgttttgattatatacatatatagatgcttcaggacccattaaacctacgtttgcttcacctgaaatcaaagctgccatagttttatctgcaccttgggtatttataaggtcaatctttataccttcatcttcaaagaatcctttcgtaatagcagcatactgtggagcataaaaaacagagtgagtaacttctgctatagttactttatccagatttttagacgaagaagattcatcttttttgtcattagagttaaaatcacatccagttagacatattgtacttacaatgatagagcttgctattgcgactatttttttaaacataataaatacctcccataagacatacgaatagtatatagtattaaaaatttattgtagttgttacaaaaatgtatctatgcttataatatttctacaaaaacttaataataattttcagttttatgtttagtttttttagtaatatgtaatattggataaattatattgattatttataaactaagtaataaaattaaaataatatcacttttttgtctattatatataaggaaaaattttttaataatataaatcatattcatttatattattaaaaaatttgtttatagaaacttttattattttatataaaaatgataaaaacttatattttgtatttaatagagtgttgctaagtgaatatatttaaaatggaggaaactttatgaaacaaaataaatatgatgatgatagattttttaataaatacagtaaaatggaacgttctacaaatggattagcaggtgctggagaatggcatgttttaaaaaaaatgttacctgatttcaaaggaaaaagagttttagatttaggatgtggatttggatggcattgtcaatatgcagttgagaatggagcaatttctgctgttggagttgatatttcagaaaaaatgttaaaagaagctagaaacaaaacgcaacttgataatataaattacatatgtatgcctattgaagatattaattttccaaaagatagttttgatgtagttattagttccttggcatttcattatattcaatcatttgaagatatatgtaagaatataagtaattgtctttcaaataaaggtaattttgtattttctgttgaacatcctatatttactgcatatggaagtcaagagtggtactgtgataaagatggcaataatctacactggccagtagatagatattttgaagaaggagtacgtaagtcaaattttctaggagaagaggttataaaatatcataaaacattaacaacttatttaaatacgttaatgaaaacaggatttgaaatattagaaattattgaacctcaaccagaagaaaaactgttagatacaattcctgatatgaaagatgagctacgtagacctatgatgttacttgtatctgcaaaaaaaagataagtaaatataaataatcattattgtagaaaaaaattgtagaaaataattacactaatggagatgattataccagtggtattaattacaccagtagtaaggaggcaaaagcattcgttgcttttgccattttttaagttgcaattatacttctacgtagtatatttcgtttccattttcttctataagctttttcatatcttcaaattttaaaaatacagtagcagtattatcatttggatgtatacctattttatccatttttaataaatccttatcaaatacaacttttacaacagcctctttatcatttaatataccaaaaggagtcacagctcctttagtaagtttcaagtatttttgaagtctttcttctgatgcaaaactaagaggtttactatcaatttgttgacgaatatcttttaaatctgcttttttgtctttacctaatacaactaaaaaatgttcttttcctttagcatcacgaagaaataggttttttacaacaaattccatatgtaatgtttttaattcttccatttcttcaattgtataaactggtggatgatttacagcctcataaggtatgcttaactcatctaattttttatatacttcctgttgttgattgttcatgatttcctcccattagaaatttattttatatataaataatattatcacagaaaactttaaaagaaaacgttttatataatatagacaatagattatatttttataaagaagcaagaatactcaataaaacttaaagaaattaaacaatttctaaaaataccttgaaaatagaaccttatttgccatttataaattatataaaaagggattatataaagtcatatatgaaaaaactatattatactatcttttctttttggaataaactatactttaaatatagatatttaatttaaataaattttacagtattaatagtaaattatcttagaaaggaatgtgctttatatgtctacagacaaagttgttggaatcatagatgaagaaacggcagaacttgcaggaattgaatatactggtaaaatttatgcttcttctggtgttataaaacatataaagaaaaaacatagatgtcaactgagtaaggatatttttaatgatataatagacactataaaagtggtattaaagtcacctgaatatataggaagtcatcctaaaaaacctggaaaaagtgtggagtttataaaaaaaattgataattatattttagtagctacagaattagatacaaaaaaaggatatttatatgtatcttcaatgtatgctataaaagaagcaaaattagaaagtagagtaaacaatggaagagtaaaacaatatgatggttaacataatattattaattttccccaaaatattgaaaaatattattatataagttataatattaatatacacgtagatatttattagttagatttgaggttggaaaaggcacccaatacgctactatagagtagttaatagagatgcaggatacgccgccctgccaaatctaattaaattaaaaagagaggattaattcctctctttttgtttttttgagatactaatttaatctatatagaaagattgaaggtcatttatactaaaagttttcagttatatacattaaactaattaaataagatatttataatctatatatgatacatattatatattaataaaagaaaaatatatagaaaatccttataaaaatttaaattgtaatgaatagtaagtaattaaaaagaatttttattgatttttaaaaatttagttagaaactatatcattatggtaaagaatgtattataatgtttagaaatattataataaggagcgattaaacatgaatctatcgaagaaaatagaagataaaagaaaagctaaacagagagctgaaaaagttaagaaagctaaaattgctacagctggtgtggtattaggagctgttactggtgcagtgagtggagtacttttggctcctaaatctggaaaagaaacaagagaggatataaaagatgcttcacaacaaattgctgaaaagataaatatgaaaactgtagatgtaaaaggcaaagtatctgagaagctagaggataaaaaaggaaactttatagaatcaaagaaaaaaataaaaaaatatatagataacaaaaagagtgttgaaaattctagtgaggaagataaaataatagatatagttgaaccagttagtgttactgaggaataatatggacaatacaataacgattaacataagtataatatatgtattattagctatacttgcttgtattgctttagtttatttaattattgtacttgttaaactacataagattttaaataatgttggaactatgttaaatgaaaatactcaaaatataaatacaactttaaataatcttcctaatgttgtagaaacttttggagaagtaggagaaaatatgaaagatgtaacagaagtagttactgaagttacagcagattttcttgttactaaagacagtgtcaaatcaaatatggatgttatagtcgatatattgactataattaaaaatatttttctagataaaaagtaataaatttaatataaaataagatataatttaaacgaccttaaaataacatttataaggtcgttttttattagcttgatttgacactatgtgtttttaataattggtaatattcctctttatcatttgaacatatatatctatgcttgttgtttcaattacatccataagaacatctttacattcaagctcaaaatcttccattccttctaaatattcatcatcttcatcaaaaaagatataagaattatatagccattcttcaaatttttcttcaagtatatcccaatacgaactccaaaataatccacaacctgatatataagatgctctactttgatttatataaacctcatttagaagcttttgtaatctactgctataaagaaaatctgctcttccactgcttgatattaattcatttaaatcttctattgacattaattcaactttaccacttttatcataaggagtataattttcatcaacccatttatgtggtttgttttctctgcatactgttgctatcaactctacaacttttgttcttatcatttttttatcctaacttatttattttttataaaataatcatgattttataatttatctatttcttgtaatgctaatttaacagtttcatatctatcagcaccatttattactacatcaccttttacaagtttattagcttctccacctacaacataaacctttttacctaaaccttgcttataactagacgcctcaattattaaagaatctttcaattgccaatgtaaaatctgagcagccactttatcagcatcacctgtataaacgattacattttcatacactttattttcccctcccccttgagaatttgatatagatttgtttagtataccttctgctatcaatttagcaactttatctttattattaacataataatctgtatctgctttactatctacaaaacatacttctattaatattgctggtgcaatagtatgattaagccaataaagacctctaacatcagactttgcacccctatctttgaatactgtagctaacctagtattcactctttctgcataggttttgccattattagtcttatatattgtttctgtccctactggagttgaagttgtagcatttgaattaaaatgaatctgaacagccaaatcagtttcctgtttatttgctatagcacattggtctgctaaatgattacttgattcatcaactcttcctgtataaacagtagctccacctattttaagccatttaacaattaagtcattcagtattcttgtttctttgctttcgtttatatacccaacagctcctgtaccttttccaattaaagtgtgccctggtattattactactttcaaactaacatctcctttacaattaaatttaacttctatttaatatatgcataacctagaattttgtttctttttatatcttatacttttattataacccattttgtaaaaatatagaatattaagtaaataatgttaaaattataattttgtatataagacattacttgattgcaataattttatagcatattcatctattctatatccagttctataatatatatgtttaattccagcttgaattatagccttagtacaatttaagcaaggaaagtgagttacataaatagagcaatctttaactgaaataccttcttttgcacaataataaagggcattttgttcagcgtgaatggttctaatacaatgtccatctctcatttcatgaccaacttcactacaatgcttatctccagaaatactaccattatatccagtagacactattctgttttctgaattgacaattatagctcctacataagctctatcacaagttcctctttcagctactgtttcgcacagtctcataaaatattcttgccatgagcatctattttcaagttttttattcaaatcatatacctccaaaatttatatctaatatataagatttataccttaaaaataatattaaaaacaaatttatacgataaataaaatttattaatactgtttttagtctaaattatttcattttaaattaaagttacaaggaatctaaaattatatatatctttcttcgtaatatgaatgttacaatataaaaaactgtctcaataaaatagagacagttttacagtcaaagtttataatacaagttcatatttttctttaaattcttttacagcttcgggccatgccttttgttctgtaatacctttttctttagctattttaattgcaatctctcttatcattgcagcgccttctaatattcccatttttaatctcccttcaaatatctttttgtatagaatataaatagtgctaagatttattacatgctgcatatacaatatctatacaacacataacttgtaaattccttttattttcatacgtctttaaccgacatataattatattcaataagttttaaaattatgaactcaattataattatttttatttttttagaatctaaacactaaaaattgtaggtaaatttgtcttatgcctttataaatatttctacagttttaattactggacatatctatttttattataaaaagcgcttaaaaatcgagaatatccgcgtaaaagctgtatataagcaaaacgattaaaggaaaaagaagaaatttacttgaatgttaaaatgcgttgcttgaagcaacgggcagttttgcctataatatcggtaacaactgaaagaaaggtggttagccctaatgttaagcgaaaacattaaaacaatcaggaagtcaaaaggactttcacaacaagaacttgctatcaaactgaatgtagtgcgacaaacaatatctaaatgggaacaaggactgtcggttcccgattctgatatgttgatttccatatcagaggtgcttgaaacgcctgtaagcactttacttggagaaactattgttgagtcggaagttgatagcttaaaagtgatttctgaaaaattagagattataaacttgcaacttgcacaaagaaaaaacatgagaagaaaaatgtttcattggttatttattttattatgtgcagtcatagtaatagtttttgtggtcttagggggactaaatagtccttacttggattggaattataccgaccctgaaaccgctgtttttggagtagcttttcatgcttttgagtggctatttgtcagattagtaccgattgtccttataggagcaattattggaatctttttgacacgtaagaaaatatgaagtaactctgctttttataatatagcaagcgttccttaaaagtgtcattctacatggcaatcgaggacaactatgtaaggaagaacctttttgatttccaactaagcgaagttattgaggacgccagtaggcccaaaaccgcattaagtaaagtacaggaagcaagactgctggacttatactctcatgcgtcagatgcagaaaatgcgaggtctgtagcatgatttacaacgatttgtacaacgactacgagtagaaatatatggagataagtattatctacgaaatcagaaaagaaatgacttgataatttactcatgttataattattgatgtgaaattaataaatcgaaattccttttttagatttaacaatactgagtaaggaaaaagtgaatgacttttgcaaggaggtgttaatatcaggcaaataaagtcttttgtttttccagttatatccttaatattcttagatcaaattagcaaagttcttataggattattcttaatggactttgaaattgatataattgggaaatttttaagattcaatcctgttcaaaatacaaaattaagtctctgctatctaacaaacggagcacaaaaatgaaaattaaatattaaatataaagcacagttaattttgattaaaaagttgactgtcttttcttttttataaatttaagcatgggtaataaagaaatgactgcatttaagcattatgtatataattggaggcaataaaaagccagcaaagcccataaaatagagctgtgctagcaacatgatgagttataagaagataatcaaaagcttacgctttattttaatttaaaaaaatgattactgtaaagaaatcattttttattataatcactgatacatcaaatattctaaataaaatttttatttatctggaattgtatattttttctataatattaactacagcgtacattgcccaagcacaaatagccaatacaaatactcccatcattactaaatctaatttaaatacttgagaaccatatactatcaagtagcctattccatatcttgaaactaaaaattctccaactattacacctacccatgccataccaatattaattttagttaaatttattaaatttcctgtgtttgcaggtaatatgagtttaaataatatttgagatttagtagctccaaagctttttaacatcttaattttttcttcatctatattcataaaataattataagctgaaagtatagtaacaacaacagaaatcgttacagctgttacgacgattccttctattccagcacctacccaaactataattataggagctaaagcagtcttaggaagagcatttaaaactaccaaaaatgggtctaatatttttgataatttttctgaccaccaaagagcaattgctaccaaaatacctaatacagtacctataacaagaccaagaacagtttcatatacagatattccaatatgtttaaataattgaccactaaatgcatattgaataaataaattgtaaatatcacttggtttgctaaatagaaatgtatttataacatttaagtcagctaaaagttcccagattacaataaaaccaattaaaattaatagctggtagaataatacatttcttttttctctttttacacctttaacatagtttatatatccttcagatcttttattaagcctcatgtgtatctagctccttccataatatgtcgaaatacttttgaaaatcaggaactttacgtgttttgagaggcgtttttgttccatccatgttaagttcaatatcgtaaatattttttatggtagctggtcttttagatagtattgcaaccttatctgatatgcttattgcttctgctatagctaaaaaagtgcaactaattgcttaaagaaacagaattatccacttcagcacccatataaacaatattaagatttcctaaactgctatcccaaatgatactattaataatagtagataataacaatctcttatcatctaaactggcattatcaacttcatcattaaatctcttcaaattactaacaataatatcaatattaatactgtcactactaatattgatattactagattccaaaatattaatcttatcctttaaaatactaatctcattatttaggctctcaatctgggaaactatataatcagaagcagtactaccagtattttttgcaagctctataactaaatttttaataagtctttccttatctaaaatttgatttttaagtaaattagtctcagatttaaaaatattaaaaacattatcagtcttaatgttattactattgaatgcacttataatagactcttctttacaattcttaattttatctataactaaactttcaactaatggaccattaagatttttacagttgcaactatcagacccaagtgtttttttagtaccacaaatataataatactttaaatccttgtcagtttttttgcctttataggtaattctcatattagaaccacatttaccacattttataagaccagataaaagagcagtttttccagttgatatccttggagttttatcacgatttttatctaattgattttgtacttcaagccatatttcaggttctatgactccatggtgttttgcaattgctgctattgagttagatgtatttttagcataggtaaggattccacattttctatctggagtacctacaacatccataccactatttttaaggtaatctaaaatttcatcattagcttttacatatgctggatttctaagtattctagataaagaactagggtcaaatttaccaccacgaggaccccttattccattattatagacatatttatataacttagataaggacctaagttctaaatatttattgtatattagctttacaatctccatttgttcatcatttacttgaagcttatacatacttctttcttttagattttcatctaagaatgtgattttttcactgttgaatccatgaggtgtattgcctccaagccatctaccactacgggctaattcatacatgttgtcttttatacgttctgctattgtttctctttctaattgagcaaatacacttgatataaacatcatagctcttcccattggagttgaagtatcaaattgttctttgatagatataaatgatatgtttagttcatttaatttttctattaaagtagagaagtcagatacatttctcgatatcctatctaatctataacaaactaggtaactaaatttcttatctttagcatcctgcatcattttcttaaattgtggtctatctatattgctaccactaaatccctcatcttcatatatcaaaaaatcttttacaccaatagactttgcataatcaatacataattgtatttgattttctatagaatcaccttttccagtaaatcttgattttcttgaataaattgcagctttcaaaattaaaacctcctataaattaggatatatatttgaaattatttatatacaaccttttaagtaaacttattagaataaatttattaattaggtaaatttatataattctactttttataatatatgactatttattttatttctttactattcaagttctaaatcaataataaattttgatatttaattgtatcaggacaaatctctaatttcatatattattaatataaaatcataggttagtgtgaaaaagttgaaatttaaatattttaaaagataattttttggaactaataggtataacaaaaatttatagggggattgcatatggaaatcaatgttatagaaattttccctaaagataaagctaaacttaataaaatagaaatggataaagctagttggtttgtaaatataataagtaaaaaatatcctaaagaagctttaaatgaagcatttagtattttagaaaaagaattaaatataagtaaagctaatacataagctttgattattgattttatatactattggttttatacgctatgacttgacattatattaatcaaatagtatatttttaaatatagcacaatgaagtgttaaaagagcaatggagctccatagataaagtctatggagcttttttgcgtatttaacttaaggaggatagagctttgaataactttgagattaaaactagaataaaatttggagaaggttcactaaaagttttgcaagaattaaaaaacaaaaatgtattaataataacagacccttttatggtgaaatcaaaaacaatagataaaataacatctaatttaataaactcaacatatcaagtttttgaagaaatagtaccagacccaccaatagaagtagtagtagcaggaatagaagcatttaaatctataaatccagacgtaataatagcattaggtggtggttctgcaatagatgcagcaaaatctataatggacttttctaaaaaaatattaaaaattaacgaagtagagtttatagcaataccaacaacaagtggaacaggttcagaagtaacatcatttgctgtaataacagatagtcaaaaaaaatgtaagtatccattagtgagtgatgatttacttccagatatggcaatactagacccagagcttgtaaaaactgtaccaaattttataacagcagatacagggatggatgtattgacacatgctatagaagcttacgtatctacaaattctaatgacttttcagatgcactagctgaaaaatctataaagttagtatttaaatacttaataaaagcatataaagatggaaatgacatagaagctcgagaaaaaatgcacaatgcatcttgtttagcaggtatggcatttaaccaagcatcacttggcataaatcattctattgcacatgtattaggtggaaaattccatataccacatggaagaacaaattctatattacttcctcatgtaatagaatataattcatcaatagtaggatatactaacacaacttactctgatacagctaaaaaatatgcacaaatagcagaattagtaggacttgggagtgctaatataagaatatctgttagaaatttagtaaatgaaataaagaaactacaaaaagaaatgaatatgccaactaaattgacacaatgcaaattaagtttagaagatataactaatgaagaaagagaaatagcaaaacttgctataaaagatacttgtacattaactaatcctaaggtaccaactgaagatgatataataaacatattaaataacattaaataactacattttattacatgtaaatataatattatacaaatagggaaaatgtttttaaaaatataaattatatattgacaaatataaaacataaaactataatgaaagtatcacaaaggcgtgatactttagtagaaagcaatggagcttcttaggaatattaatattattcttatggagctccttttattttaagcaaatagctttttaataaactatattcaaagaaagcagggaataaatttgactgaagaatctaagcaaagagttattcaagaatatgttcctggaaaacaggttacattagcacatatcatagctaaccctaatgaagacatatataagaagttaggattagtacttgataaaagagatgcaataggaatacttacaataacaccaagtgaagcgtcaataatagcagcagatgttgctacaaaggcttcaaatgtatctttaggttttatagatagatttagtggttcagtagtaatatcaggtgatgtaagttctgtagaatcagcgttaaatgatgttttagaagtcttaggaaatatgttaaacttctcatctacaaaaatcacaaggacataataatacaatgaagaatataatatttatgggaaagacaggtagtggtaaaactaccttatgtcaaaaactagaccagttagaattaaagtataaaaaaactcaatcagtggaactttataataatgcaatagatactcctggtgagtatatggaaaatagaaacctatataatgccttaataacaacatcagcagatgctaaaattatagcaatagtgtatgatgccacacaagaagaaaattatatagcaccaggttttgccagtatgttttgcaaagacgtaataggaattataactaaaataaataaagctactgaaaacgaagtcaatatagcttatgaaagactatcactagcaggagcaagtcaaatctttaaaatagacacagttgatgatattggacttgaaaaattatttaaatatctagaaaaatctaaaaatatagatgaagtttaaggggaaatatttttttattcaaaaatattattaaagtatgataaaataaaaaaatgtataaactattttaagaagatttaatctttaagcgaggtaggaacatggggaaaaaaatactattggttgatgatgaaccactgttaaggatggatacaaaagatatattagaaagtcatggctatgaaataataggcgaagcaagtgatggatttgaagctgttgaaatgtgtaaaaaacacaaacctgatttagttataatggatatagagatgccaatacttgatggtataaaggcaggcaaaataatatgtaaagaaaatctagctggtggagtacttttattaacttcatttgaagataaagaatacgtagaaaaggctaaaagtataggtgcttatggatatttagtaaaaacagcaagtgaaaaatcacttatcccaaccatagaaatgtgtttaaataaggtaaatgaatttgaaaaaatgaaaaaagatttagaaaaagtaaattctaaattgaatgaaagaaaattagtagaaagagcaaaaggtatacttataagagagtttaagatttctgaggatgaagcatacactagaataagaaaattaagtatggataaaagaactacaatgatggaaattgccaaaatgattataataggatacgatgactaatacgataaaaaaaatatcaactgcacaaacatacttaaataataacgaaattgaaaaaattatagaagtatcaaaatccttagatttaatggcttctttttatgaggctgatgtttttatagatgtactaagtaaatttgatgatgaagcaattgttgtggcacatggtagacctaaagaaaagtcaatgtactgtgaaaatgttataggtaaaaaggctttaattgaaaatgaaccaggagttataaagtgcttaaaaacaggagaaagagtaagagatattaaagctttaacacaggaatataaactggtcaaacaaaatattcagccaataacactagatgacaaagttttagcagtactaatagttgaaaaagatataagtagtgaagttaagaatgagtttaatgctagtgaagacgaagaaaataaaaatttacatcagtttataaaacttatcggaaataatgactttttagttgataatttaaattcagccatattaatatttgataaaaatggaaaattaaaaattaaaaatcgtattgcaactgagatatacaaaaatcttgggtttggatatgatatacaagatatgcattacaatgatttagatatagaaaccaacacctttgaaaatatattaatggatgaaaattatgatgagacaaatgaagtttcaataggtaatatgttttttaaaataaagaccatatacatcaaagatgatgaatttaaggtttgcaaaatagtacaagatataagtgatttaaagagaaaagaagaagaattagttttaaaaacagtggctataagagaagctcatcatagagtaaaaaataatcttcatacagtaatatctataataaaaaaacaaagtagattatctcaaaatgatgaagtaaagcagtgtttagataacataataaacagagtatttgcaatactttcaactcattatttactatctaaagaagttgataataatatatctatacgagaaggtatcaatttattagtgtcaaatattcaaggtggctatttatttagtaaggatatagatatacgtataactggtgaagattttaaaattagtggagaaaaagcaacagcaatacttttggttataaatgaaatactacaaaattgttatgaccatgcattttcggatagagaacatggtactatacaaatattaataaataaagataacgactatagaaatattgctattatagatgatggaattggatttgatagtaataatataaataaaaatagcttagggacatatataatagatagttatataacacagatgttaaaaggaaatatagagagaaaaagtaatgagaatggtacagaagtattaattactatacctacacaaattaatatttaaataataactcatctacaaagtagtagttttaattgagcaaagaggcttaaggttattaatagattaagttaattgaatgtatttataaaaattataagtatatattcaatttaacaggtatttattataactttaagcctctttgcttgtttaagacatacttaaattttaggaggtgagaaaatgagagaagagttattaagtgttggtattgacattggaacaagtactactcagttaattttttctaaattaatagtagaaaatactgaatcaaatttttcggtacctagaataagtatagtagacaaagaaattatttataaaagcaaagtttatttcacccctcttatttcaaataatgaaataaatggtcaacaaataaaagatatagttgaaaatgaatataaaaaagcaaatatatctaaagaggatatacatacaggagcagtaataataactggtgaaacagctagaaaagaaaatgcaaatgatgtacttcatactttgagtggatttgctggggacttcgttgttgcaacagcaggacctgatttagaaagtataatatcaggaaaaggagctggagctcatatttattcaaaagaacattcaactacaattgtaaatatagacataggtgggggaactagtaacatagcctcatttaaaaggggagaagtaaccgatactgggtgtttggatataggtggaagacttgtgaagatagataaaataagtaaaaaaataacttatatatcacctaaaatagataaaatcataaaagataataatttaaatcttcaagtaggcacaatggctactgtagaaaatacaaagccaatagtggatataatggttgacttattaatggaaagcataggattaaagaaacagacacctttgtttgattttataataaccaataaatcaataagtatagatgaaaatattaaaaatgtttcattctctggtggagtagctgattatatttactatgatggagaaataaaagattattttgaatatggtgacttgggaattttacttgggcaaacaataaaaaattgtgaataccttaaaaaagtaaatgtagttaaatctatggaaacaataagagccacagtggttggggcaggttctcatactactgaagtaagtggaagtacaataacttacactagcgaaaagtttccacttaagaacttgccagttttaaaattatcagttgatgaagaaacaggtacttcaaaacaaatcagtgaagctataaaaaataaacttaattggtttaaactagaaaatgatttgcagaaagttgctatagccatgataggaaagaaaaatccaacctttttagatatacaagagtatgctaaagggtttgtagatggaatgcaacaaatcatagaaaatgatttaccttttatagtaattgttgaaaatgatatggcaaaagtgttaggtcaagcaatatatgcattattaaattatgaaaaagaaattgtttgtatagacagtgtcaaggttgaaaatggagactatatcgacattggaaaacctatagttgaaggtaaagttttacctgtggtaataaaaacattagtttttaattaatagaaggaggtaagtaaatgattttaaatacaaaattatttggacgtacttatcagtttaaaggcttatatgatgtaatggctaaagctaatgaagaaaaatcaggagataaattagcaggtcttgcagcagaatcagctgaagaaagaatagcagcaaaagttgttttatcacacataaaattggaggatataagaaataatcctgcagtggcatatgaagaagatgaagtaacaagaataatacaagatgctgtaaatgaaaaagtttatgaagaaataaaaaattggacagtatctgaacttagagaatggctattggattcaaatactacaagtcttgatataagaagaatatcaagaggattaacttctgaaatgatagcagcagttgcaaaattaatgtcaaatatggacttagtttatgcagctaaaaagataaaggttactgctcactgtaatacaactataggagaacaaggaacattatcagcaagacttcaacctaatcatccaacagacgacccagatggaatacttgcatcacttcttgaaggtttaacttttggtataggagatgcagtacttggattaaatccagttgatgactctgttgagagcgttactaaagtattaaaaagatttgaagaagtaaaacaaaaatatcagataccaactcaaacatgtgtattggcacacgttactacacaaatggaagcaataagaaatggtgctcctgcagatttaatattccaatctatagcaggttctgaaaaaggaaatgaagcatttggatttaatggcgacactatagaagaagctagacagttagctttaaaacacggtacagctacaggacctaacgttatgtattttgaaactggacaaggttcagaattatcttcagaagcacatcatggaatagaccaagttactatggaagctagatgctatggatttgctaaaaagtatgaaccattcttagtaaatacagttgttgggtttataggacctgagtacttatatgatgctagagaagttgtaagagcaggacttgaagaccactttatgggtaaactacatggcttaccaatgggtgttgatgtttgttacactaaccatatgaaggctgaccaaaatgatatggaaaacttagccatactattaacaacagcaggatgtacgtattttatgggaatacctcatggagatgatgttatgcttaactatcaaacaacaggataccatgaaacagcatcacttagagaaatgtttggactaacagcaataaaagaatttgatgcttggatggaaaagatgggattctataaagatggtaagttaacagagttggcgggagacgcatctgtattattaggataggaggtatttaatatgaatgagaaggatttaaaagcattggtagaacaattagttggacaaatggttggagaattagatactaatgttgtatctgagactgttaaaaagacaactgaagttgtagtagacaacaatgcttttatagatgatataacagaagttgatataagaaagcaattactagtaaaaaatcctaaggatgcagaagcttatttagatatgaaagcaaaaacacctgcaagattaggtataggaagagctggtactagatataaaacagaaacagttttaagatttagagcagaccatgctgctgcacaagatgctgtattctcttatgtagatgaagaatttataaaagaaaataatatgtttgcagtggaaactttatgtaaagataaagatgaatacttaacaagaccagatttgggaagaaaattttctcaagaaactataaataatataaaatctaaatttggtacaaatcaaaaggttttaatattagttggagatgggcttagctcagctgcaatagaggcaaatttaaaagactgtgtgccagctataaaacagggtctaaaaatgtatggtatagattcaagtgaaattttatttgttaaacattgtagagttggtgctatggaccacttaggtgaagaattaggttgtgaagttatatgtatgttggttggagaaagaccaggattagttactgctgaatcaatgtcagcatatatagcttataagccatatataggaatggcagaagcaaaaagaacagttatatcaaatattcacaaaggtggaacaactgcagttgaagcaggtgctcatatagctgaacttataaaaactatgttagataaaaaagcttcaggaatagaccttaaataaagtcgagggagtgtagaatatgaaaaatgatgtaattcgtcctaatatactaggaattaaaataatttcgaatataagtccagaaatggcacaaaaactagaattaaaatcacatcacaaaagtttaggtttaataactgcagactgtgatgatgttacgtatacagctcttgacgaagcaactaaagcttcagaggttgatgttgtatatgcaaaatcaatgtatgcaggtgctgcaaatgcttcaacaaaacttgctggtgaagtattaggaataatagcaggcccaagcccagcagaagtaagaagtggtctaaatgcagtagttgattttctagagtatggagcaacttttataagtgcaaatgatgatgattcaatagcatactatgctcactgcgtatcaagaacaggtacatacctttcagagatagcaggaataagagaaggtgaagcattagcttatttagtagcaccaccacttgaagcaatgtatgcactagatgcagcaatgaaagctgcagatgttaagatgtgtgaattatttgcacctccaactgaaacaaactttggtggagcattacttacaggttctcaatcggcttgtaaagcagcatgtgatgcatttgcagaagcagtaaaatcagttgcagacaatccaacaggattttaaggatagttagatggatgctataggcttaatagaagtaataggatatgttgctgcaatagaagcttctgatgcttgtttaaaatctgcaaatgttaatattgtaagaattgataaggttggggcaggtattgttactttaacaatatgtggagatgtcggtgctgtaaaagctgctttagaagcaggtgaaatagcagcttccagagttggtacattaagaacatcacatattataccgagaatccataatgaagtaacaaatgctttattcaaaactaaagaacctaaagtctgtgaagtttcagaagataaagaaaaaaactttgagattacattggaaataactgataatgtatcgaaaaatttatcagaaaaagaaaatgtaattttagatgtcaatgaaaacagtggagatactgaaaatttatatagtgatatagataaaacaaacaaaaaaattgaaacagttgatgatagtttaacagaagctaatgaggaaaaaatagaaaatactaatgataaagaagtattggaacaagttaaaatagaaaattccgattttgatagagatgacctatcaaagaacagtgtaaaaaaacttaaagctatggctaagaaattagattcttcaataacttataaagatttaaatgttcttaaaaaagaagaattaataaacttagttaaaaagcttagcagaagggatagatagttatgacacttttagataaagatttagtatctatacaagaagtcagaactcttgtaagaagatctaaagtggctcaagagaaactttctaaaatgagtcaagagcaaatagataaaatagtaaaagctgttgtagatgcagcatttaataatgctactaaattagctaaaatggcaaatgaagaaactggatttggaaaatgggaagataaagtaattaaaaatacttttgcatctatgggagtttatgaaactttaaagaacacaaaaactattggaataattggtgaagataaagaagccaatacgatagatatagctacaccagttggagttgtggcaggtcttataccttcaacaaacccaacatcaacagtaatatacaaaactataatatctctaaaagcaggaaatactatagttttctctccacatccaaatgcaaaaaactgcatacttgaaacagttaatataataagtgaggctgctataaaggctggagctccagaggattcaatattatgtataactaatccaagtatagttggaaccaatgaattgatgaaacataaagatacaaacttaatactagcaactggaggagaagcaatggttagagctgcttactcttcaggaacaccagctattggagttggaccaggaaatggaccagcatttatagataaatcagcaaatgttaaattagcaatcaaaagaataatagattctaaaacttttgataatggtgttatatgtgcatcagagcaatctatagtaatagaaaaatctatggaagaaactgttttaaaagagcttaaaaatcaaggtgcatatgttttaaatgaagaggaaagtgaaagattagcaaaattcatattaagagctaatggtactatgaatccacaaatagttggtaaaagtgttgaggtaatagcaaatttagcagacttaacaaatatacctaaaaatacaaaagttctagttgcaagagaaaataaagttggtcacaatgtagcctattcaagagaaaaacttacaccaatactagcgttttatgttgaagaaaatgtagaagctattatgaacagatgtagagaaatattgttaaatgaaggtgcaggtcatacattctcaatgcatgtaaatgatgaagaattggtaaaaagatttgcccttaatatgccagtatcaagaatacttgtgaatactccttcagcacttggaggaataggtgcatcaacaaaccttgtaccagcactaacacttggttgtggtgcaataggtggaagttcaacttcaaacaatataggaccacttgatttaataaatgttaaaagagtagcttatggaatcaaagaaatagaagaacttggaagagataaatctcaagttgaaaaatcaatgtttgactcaatggataaagaagaattaataaatcttcttgttcaaaaactagtcaaagaactagcataactaaaataaacaatgaaacttatggctatcgctataaatttataaaaatataaactataaaaaactataaaattaaatttttggaggataagattatggcaagtgcaaacgcattaggaatgatagaaactaaaggattagtaggagcaatagaagcagcagatgcaatggttaaagctgcaaatgtacaattagtaggaaaagagcaagtaggtggaggattagttactgtaatggtaagaggagatgttggagctgttaaagctgctacagatgcaggagctgcagctgccgagagagttggagaactaatatcagttcatgttataccaagaccacactttgaagtagatgctatattaccaaaggtatcagctgagtaatataagaataattttaaaatttaaattttgattgaaaaagaggctatctcaaaaatgagtcttactaataaactcaatgtattttgaggtagtcttttttatacatctaataggagatgtgataaaatgggtgttttaacagaaaacgaagtaaaaagaaaaattggaaaaaacaaaaataatataactgaattttatatagaaaaaggtcaaataataactccttctgcaaaatcttatttagctgagagaagtattgagcttaaatatgttgataaactttcagatgtaaacaatgaacctaaagaagttgtaaaagaagtagttaaagagaaaaaatataaatatactactgtatttggcgctaaattggatgaaaaaccagaacatatgactcaattaaatggaaatcttttagtttttaaagaccataaaagaataatattgagaggaaaaatagattctcttgaatcagaaatactaaaggtacagatactttgtcagaaactagatatgccaaagcttgttaaggaattgcaagaagtattagactttgtaagaaatataatgagatgtgaagttttagatgaaaagctagaagactttaaacttttaggattaactcctcaagaacttagagaacaatctcactatcctaaaaaatactttggtataggacatgaattcccaagttatgaaatgggagaagtagtagtagctataaatagtataagaagtaatacacgagaggttgaacttgcagcctatgaagcatttaagggtgagtatggaaatgttcacagagaagatttaataaaggcacttaatagattatcgtcagtattttggataatgatatataaggttagaactaataagtataagtagttggaggacataatggagaatctattaaatgaaatagtggaagaagtaataactagagttaaaaaagaagcatttatagaagttgaagcatcaggaagacacgttcacttaagtagagaagatgtcgataaattatttggagaaggatatactcttacaaaactaaaagacctatctcaaccaggtcaatatgcatgtaaggaaagagttacaataactggtcctaaaggaagtataaaaaatgtagttgtacttggaccatgtagaaatgaaactcaggtagaaatatctttaacagatggttcaactcttggactaaaagctcctataaaacaaagtggagacttagaaggtactttaagtattaaaatatcaacacaatatggtgaagttgaacttgataaggggttaatggttgctaaaagacatatacacatgactcctaaagatgctgaaaaattcaatgtatgtgataaagagatagttgaagccaaggtgatgggtcaaagacctttaacatttgatgatgtagtaataagagtgagtgacagttttaaaacttatatgcatatagactatgatgaagccaatgcatgtggttattcaaaaggaactgttgctaaaataataaagaaagcataaatttaacctactatataaattacctctagggaggatttaatatgaattatgataaccttgtagatttaataacggaagaaatctataaaaaaataaatagtaatgaaataaaaatatctaataaacctaaagctgtgattgtatttgaacaagataacaataaatttaacttattaaaagatgaatttgaaatactagaatttgataaaagtataagggaatgtgaaatagtgatagtttcaagactttgtatgagggggctatcgaatatagcacttggaaattcaacaagtgatgaagaaagatttatactaaaaatgattatgaaaggcaaaaaagtatatgtcctagatgaaggaattgaatacaaaaaatataaggatactgcaccaaaagcattatataagaaatttatgtcatttgaagatgaaatatgtaaatttggtgtagaaattataaaagacttaaatgttataactaaaaataagttaaatataaagaaagaactagaaagtactagaggttctaaaaaagaagatacaaaagttttagataaagatgttttaaatttaaccagtgtagaaagtgtaaaaatagataatgaatttagtttggatttaaggaataaaaaacttatatcggaagctgacttaagaaaaccaactataaatggagttaaaaacatattagttaataaaaaaagtataataacaccattagctgtagattttatgagaatacaccatctcaaactaaagaaactgtaaggaggtaattttatggatataggaaaagttgtaggtaatgtttgggctacaagaaaagatgaaaaattatgtggccaaaaacttttagttgtaaaaattttaaaaactaaagacacatacaaggaaggcttcatggttgcagccgataatgcaggagcaggaaatggagacttagttcttatatccaaaggttcctcagctagagagtcgattgaaaaatctcatgttccagtagatgcaactatagttggagtagtcgattcgtttgaggtgtttgatgaataaaagtataggagctatagagtttaaaagcattgctaaaggtatagaagtatccaatgaaatgataaagaaatcttcagttgatgtattgtacttaaaaagtatttgcccaggtaaatttctaataatagtaggtggagaaacttcttatataaatgaatgtgtagattatggaataaaacttggagaaggatatattgtagataacttcgtaataaatgcaatttcacaagaaatattagatggatttaaaaataagtatcaaaagctagatagtatagtctctataggcgttgttgaaagtagtaaagtatgcgctggaataaaaatgcttgataagactttaaaatctggcgacttagtattagtaaaacttcaattatcttttgctataggtggcaaattagtatatgtagtagcaggagatttaagtagtttagaatatgcattaaaagaaagtgaaaatgtagtaagagaaaaagaagtaatatataagactgtaataccatcagtagacagtcaaataataaaaagtctaataaaataatggggggaattatgagtataaacgaaattataatctatgtaatggtagtcttcatggtacttggagctatagataaatgtataggtaacaaatttggtcttggagaacaatttgaagaaggtataatggcaatggggtcacttgcagttgcaatggttggtgttatatgtttagcaccagttcttgctgatgtattaagaccaattgtagtaccagtatttaatatacttggagctgacccagctatgtttgctggaagtttattagctaatgatatgggtggtgcgccacttgcacttgaacttgcgaaagaccctaattctgggttatttggtggattaatagtaggggctatgatgggacctacaatagtatttataataccagttgcgcttggaataattgaaaaagaagaccaaaaattcttagcaacaggaatacttgcaggtataataacaatacctattggagcattcgttggtggattagttgcaggattcgaggtaatgatggttcttagaaacttagtgccaataataatatttgcagtagttatagcacttggattattaaaattcgaaaatgctatgataaaaggattcacatactttggaaaaggtgtagtaatagttataactttaggacttgctgctgccatagttgaagctttaacaggaatagttgtaatacctggaatgaaaccaatcagtgaaggtatagaaatagttggagatatagcaatagttttagcaggagcattcccattagtgtttgttataacaaaggtatttaataaaccattaatggctttaggaaaagttcttggaatgaatgatgtatcagcagcaggccttgttgcaagtttagctaactgtataccaatgtttggtatgatgaaagatatggacaatagaggaaaaataataaatgtagcattctctgtatcagcagcattcgtatttggagaccacttaggatttacggcaggatttaattctaatatgataacaccaatgatagttgctaaattagttggtggtataacagcagtattgttagctatggttatcgcaaataagacactaaggaaggagaatgtataagatggatatatcaaatatagataaaaatttaattgaaacattagtaagacaaataatagaagaaaaaataagtggaactaaagacacagtagattttgttagaaataaagacattagtggaataacttctataaagttaccaactgtaaaagttagtgaatctgatagattagatacagggaatccaagtgatgtagtttacacaaaagatttatttacattagaggaaagcccaagattaggttgtggtatgatggaaatgaaagaaacaacttttgattggactctaaactatgatgaaatagattatgtaatagatggaactttagatataataatagatggaagaaaggtttctgcttcttcaggtgaattaatattcataccaaaaggaagtaagatacaattttctgtacctgattatgctagatttatatatgtaacatatccggcagattgggcatctcaaaattaataaaaatcaagttaagttaataataatcaaataaataatttaaaatacaaactcttaaataaacacacatatttaaaaaagctatgaattaaaattcatagctttttttataaagaatgttatattttagacgtattttttctatatttactgggagacatattatattttttattaaataatctaataaaatgctctacatttggataaccaatactattttactgataatcttttccttatcactaatcttacattttaaaatattatttttactcgtaatattatcataagaatttgtttcttatttaaaactaattagaattataaagtttattgccatgttattaataaaataaatccagttaaatcgagtgctagttaaagtaataagaaacttttacaatggtttcctttatcgattgaaataaaagttaatatggtataatatctaaagagagaatcttatcaattagaatatgcatagaaacaagtggcttaaaaggagacgttatatggaagagatagtaaagaaggaacaagcaagtatgaatgatatttttttgtatcttaaagctaaatcaaactcattatataaatttgtaatattatataatgagtttatcaataaacctaaagattatggaactggggaacttataaacatggttgaagtacatatgctaacagcgattgaagaaaatccaggaataagtccaactcagttagctaaaatatggaacagaactaaaggtgcaatatctcaaactatatctaaattggagaaaaagggttatataactaaagaaaagaaagaaggaaatgcaaaaactatattactatatccaaccacatcaggagtagagttaagtaaggcacataaactatatgacaccatagatgttacaagaacatttgaatacttaatcaaggagtgtacattagaggagatagatagtttttataaagtaattgatttgtttattaatttattagaagaatctccgcaggaaaataatgattctgaaaaagtgtagctaagattgaagttgaataaagagaaatagatattatagaagtagtacttaagtacacattatataaaaatataataggtataggattaaaaagtttagtggtttaaagtttaaccactaaacttttttaatgtctataatctactattatttaatttactaaaaataaaaaaactcattatattaagatgaaaatagaaaaataactagaaaaatactataatatatcagcttaatacagaaaaaagttaaaaatattgagaaaaataaaaatgaaaacgttttatattgacatagagaaaaagtagtgataccatttaaatatagtttagtagctaaactatatttaaattataataactattttagggggatgttatgaatttaaaacaattaagtgaaaaatacgaagaatatgtaattcaaatgagaagagaatttcataagtatccagaattatcttttaaagaaataagaacaacccaaagaataagggaagaattacaaaaaataggggtcccttttgtatctattgaaccaaatatcgtaatagctactatacaaggcaaaaatgaaggtaagacaattgcaattagaggagatatagatgcgcttccaatgcaagaagattcagatgttgaatacaaatcagaatatgatggaataatgcattcttgtggacatgatgctcatggagctatgttactaggacttgcacatatgctaaatgatataagaaaagatttaaaaggtagagtattattagtttttcaagcagctgaagaagttggtggcggacacaaggagataatacagtactttaaggaaaatggaggaccagatagattaatagctactcatgtttggtccgatattgaagctggtaaaatttctgttgaaccaggacctcgtatggctggtgggtctggttggagaatagacataacaggtagaggaggtcatggttctagaccagatcaaagcatagatcctataaagccagcttgtgatatagttttaaaagtatcttctataccagttaatcatataagtgtactagaacaatgtgttgtacatgcatgtgcaatacatggaggaactacaataggaaatgttattccaaacaatgcagaggtaataggtggatatagatattttactgaagaatcaggcaaaaaagtgtttgacattataaagcaaatgagtaatggtgttggacaagcttatggagtggatgtgaaggttactcatactggaggcataggacctgttatcaatgatgaagaagcagttaagatgtctaaagaaatagtttctaatatagatggattggagttagattcttatgagccaatatgtgcatcagattgttatggtgaaatattaaaagagtattctggtttttattgttatctaggggtaggtaacaaagaaaaaggaataatatatgcacaacaccatcctaagtacaatatagatgaagatacattaaagttaggttgcgaatttatggctaaatatgcagttgaatttttaaataaaaataataactaaaataaatcgaattttataaatgggggggatgaaaatgcaaggtgcattaaaggaaaataagaaaaaaagtggtggaggatttttaggatggattgaaagagttgggaataaaatgccacatcctctagcattatttacatatattacattgatagtagtagcattatctgcaatagcaagctttttaggtttttcagcaacaagtcctgctacaggaaagttaataaaagttatgaacttaataagtgcaaaaggtttagtactatttatgcaagagtttgttaagaacttccaaaacttccctgtgcttggggtagttttagttatggcagttgccacaggagtttgtgaaaagacaggatttttttcaactgccataaaaatgagtttatcaaaagttaaggggaatgcggttgtatttataatagcttttataggagtatttgctaatcaagctggtgatgctgcttttgtattagtaccaactcttgcaggagcaatattttatggattaaatagaaatccattagctggtatattctgtggatttgcatcagttggtggtggatttgcaacagctgtaattcctgggggatgggacgttacgctaacgccaataactgtatcagctgctcaaactattcaacctgcatttgatatgacattattagctagttattatgcactatttgtatctgcgtttatagtagctacagtatcaacaatagtaacggttaaatttatagaacctaaattaggtaagtatactggtaaaccagaaggtatagatgataatcaaggttttgaggtcacaaaagaacaagcaaaagcagcaaagttagcaggttttacagttttagcttatgtagcgttattaattgctttgtgtataccagctaatagttttttaagaagtccagaaggttctttaatatttggagcaccacttatgtcttgcttacagttttttatagtaatactattcttcttgccagggattgtgtatggaatgagggttggtaaaatcaagactgtaaaagacttaaatgatatattatgtcaatcaatggcagcaatggcaccgtttatcgtacttgcaatagttataggtcaattcttaacgctattctcagtgtctaatttagcacaggtactagctataaaaggtggagcattactcaactcattgccactaccaccacaagttataatactgctattcttagtactagtagcgtttataaatatatttgttataagcggaagtacaaaatggatgatatttggaccagtatttgttccgatgttaatgcaattaaacatacatccagcatttactcagtttgtatatagattaggagattctgtaactaatcatttatcaccattaaatgcattctttataatacttttagcaacagtccaaaaatacgataaaaatgcaggtatgggaactatattctcagctatgataccttacactataggttactttgtagtacttgcagttttagtagtagtttggatgacaataggtataccagtaggaataggtggacaagtttggttataaaacatatttaataattttgggaggaaagaaaatggaaacaactgaaataagatacaattttgatgaagtaatagatagaagtggaacaaactgtcttaaatatgatcttaagagtcaatttatgccagaatctccagaagatgcactaccactatgggtagcagacatggattttgcatgtgctcctgagataattaatgcaatgcatgaaagaatagacagaaaaatatttggatatagctctcaacaaactgatgattattatgaagctgtatgtggatggtttaagagaagatttgattggaaaatagaaaaagagaatatattctttagcccaggggttgtgcctgcgttaggatttttcatacaaatattaacacaaaagggtgatggtatcataatagaaaagcctgtatactatccttttgaagataaaataactaataatgaaagaaaagtagttaatagtcctttaaagtttgaagatggtcattattctatggattatgatggatttgaagaattagctaaagatgaaaataataaggtgtttatattatgtagtcctcataatccagttggtagagtatggaaaaaagaagaacttagaaaaatagtagacatatgtaagaaatatgatttgtggataatatctgatgaaatacattgtgatattattcgtaaaagtgaaaagcatataccattagaagtagcatgtcctgattataaagatagaataataacttgtacagctccaagtaagagttttaacttagctggtatgcaattatcaaatatagtaatcaataataaggaattacaagaaaaatggatgcttgaaacagattctaaattagctatattcctacctaatccattcgcaatagttgctactaaagttgcttataatgattgtgaagattggatgaatcaagtaaatgagtatatagatggtaatattaaatatgtagaagattttgttaatgagtatatgcctaaagtaaagataataaaatctcaaggaacttacttaatttggttagactttagagggtatggattagatgcaaaacagcttgaatatgtaatgcttaacaaggcgaaggtattgctagatgaaggatacatattcggagaagaaggagcaggatttgaaagaataaatgttgcttcgcctagaacaattatagaagagtgtatgaatagaataaaatgtgcatttgaaggattataatagtaatatctaaataatatatttgtgtattttaaaaaaagactatgttaaaaaaatatttcaaagcatagtcttttaaagttttatgatgagtttaaaaaatttcaaaacgttactattattgataatcttcacttatatgtttatattagaaataattccacaatatgctcattttctaaagttgcacttttatacaccttgcttcaccaatatcatgtgtaaccaaaatagtagacttattctcattcttaataatactataaacatcatcacaaactaataatctagtctgataatcaagagctgaaaaaggttcatctaaaagtagaatatctggatttacagaaagtgttctaataagcgcaactctttgtctcatacctccagataattcttttggatacatacttctaaaatcccataatccataagtctttaaaaggctttcaactctatctaaagattttttatcttttttgccttgaatttccaatccaatagttatattatccattatatttctccattcaagcaaattatctttttgaaacatatatccaatatttccagtaatctttatatcaccactagtcggttttaaaagattagtaagaatatttaatattgtagatttaccacttccagaaggaccaagcaaagttaatatttctccttctttcaagttaaaattgacatcctttaatacttcaagctcgccttccttagtgtagaagttcatatttatatttttaacttctactatgttgtcattcattatgccaccccctataacttttagctcgtatatattatgttattaacaatatgacctatttgtaccatttttcataaatataatataaatattttgtttatttacgtattttcttagtaacttgtacgtataaattataataaataaattataaggtaggggataaatttgagtaacataataacgaatttaatagagtcagtatttactaatccaataactatattgtttttacttgcaataactgtgtattctgtttttaaaataatagaaaataacagagtatattcatttgtaagttcaaaattagacgaaatcaatagagattataagacaagtgagttttataaaaaggtaagggatgactactatacatatagtaaagaaaatccttatgcagacgtaaatataacttcatttatagaggaagttgtatctgatttaaagcataataatttgccattgttagaaaaaattagaagtataaaaaattcatcttcaataagtatattacttggggttttaggtacgtttgttggtctttctacaatgcttttatgtgttgatactaaagacattataaattcacttccttcaactattagtagtatgcaaactgcatttacaactagtatatttggagttgtattttctctaattataggttactttactaagataaaagattgtgaacatgttttgatacaaataatgttaaaatctgaaaatttactaacatctgaaataactcattttaagtcagaaagaatggatttaaaagtagaagaggtaaaaaatacaataaaacaaataagtaagtctatagaagctattgaaaaatttgataaaatatctaaagatttaaatgactttaatgatgaatttatcagtggtatagaagctttaaaaagccttttagaaggttctcaaagttctattaagacatttgaccagagcgtaagaaaattagataaacagtttaatattttaaatataaaatttgtaaagctttttgataaatatgataatcaagataatataaataaagagattttatttgatataaaagaatcttcaaaaaatatatacaatgccactgaaagccaattcaaaattagagattatataaaaaatataaatgcaggatttgctctatatgaaagaagtgctcaagatttattaactaaattaatgacccatgaaaataaaatctctcaaaatcaaaaaatccttttagatgaaaagtttaccttagatgactcaataaaaaatctctcaagtattattgaaaacttttctaatgacctacaagttaaactggatatgatgtttgaaaattctttagatattcaagataagttagatgttatgtttaataactcttttatgaatgatgaagttcctcttgatagtgaggaattatttaaggatgatgttaataatgtatttaatccttttagtgaagaaatttatgagatagaggataaagaaataaaggtcataggtgaggatgagttaaatgaataataaatatagaagaactgttaacagagaatttgaaaagagtagcttttggccaacatttacagatttattatctactgtattgatggttgtgattcttatcttatttagctcagaaagtatttcaggttctgttgaacaagatttagctaagaatgtcaatgcttctgttgaagaaacttttaaaaaaagcaaaatacctgtgaaggtagataaatctaatgggcaagtaacttttggtgaaaaaaccatgtttgatgtagatagtgatgttttaaaaccagaggctaaagaaatgctaaaaatgtttgttccaaagtacatagagactatttataaagattatggtgactatatatccaaaatagttatagaaggtcatacagatgatgtgggaagttatatatacaacttagatttatcgcaaagaagagcatatagcgttgctaaatttatagtgggagatgaaataggtgactataaatacaaagataaagtgactaagcatattattgcaataggaaggtcaaaagctgaactcatcaaaaatggtgacaatagcgtgaatagagatgcatctagaagagtagaactaaaatacgaaataaatattaatcaaaataaataattaaatttttataaaaaaaaagaaggcagttggtgtgagctttaagccttctttaaggaaaaagtttatttatttttgttgatacttaacatattatagtttttagaagcagtttgcaatatattaaacgtaaatggtcgtttaaaatgcataactggatactactgatgtaaaatatttcattttatataatataaaaattatacagtgtcaattttctatattattgtactataatctattatttaaaatattatgtaaaaaaatatcataaaaacgcatatcatgttataattactagagtattatgaatatggaggcgtagtttgtgatagaaataagtataaaaaataaaaaaaattctaaaattaaaactttgatacttttattgatagtatctatatcgatttatttaactggttgtactacatcagataatggaaataatcaatcaaataataatgattctttgtctagtagtatatcaagtgataagaatgtaaaaattcattttattgacactggaaatagtgatgcaatattgattcaagatggtaaaacttttacattgatagatgggggagataatgatgatgagggattaatggtagattacctaaacaatcaaggtgtaaaagatattaaatatcttatagctacccattctcatgcagaccatttaggtggacttgattctgttgtcaaaaactttaatatagaaaatgtttttgtatcgaatggttcagcagaaacaaagagttatagggactttataaatgctttagcaaataagggtttatccccaagtgtaccgcttgaaaataataagttctatttagaagattcttattttgaagttctaaatacaaatgggggagatactactaatgaacaatctctagtccttgtatatactaatgggaatgataaagttttatttacaggtgatgctgaagaaggtaccgaaaaagaaatactacctaagcttgagaaagtagaccttttaaaagtagctcatcatggttctcgtagtagttcatctcaagagtttttagataaagtaaatcctgaatatgcggttcttttagtaggcaagggtaattcatatggtcatccacatcaggagacaatgaataaattgaaaaaaatgggagtaaaagtacatagaagtgatgagtgttcagatataatatttgaatcaacaggtgatggagtatttacaagttgtaaagatggaagttataataaaggtgttagagaagatggaaactctggaaaatcaaacagtaatacaagtaaaaatgattcttttaaaaataaacaaaatacattcaattcagaagaaatagtgtattttactccaaaaggtaagagttatcactctataaaaaattgtagtgggctttcaagaagtaaaaaaatattatcaggcacaattgaagaaagtaagaaaaatgacccatgtgatatatgttatggaaaataacaaaaaaacaaccaatttatctataaagcttctgaactttaaatcatttaaaaaataaaataaatgcataaaaaaaataagctataatcaatagataatacatttcatctatacgaatagcttatttttttaagtattttttaatagctatttaataactctaaatacaccagttacaatacctacaatttcaacttctgagtcattgagcataattggttccataaaatcattttctggctgaagtcttattaaatttccttctttaaaaaacctcttaactgtagcagattcaccatttataagtgcaactactatctgagaatttaaggccgtattttttttgtctactacaacgtaatcttcatctaaaattcctgcattaatcatactttcgccttttactcttaatacaaaattgttactgccctttactaaactggcagggaatggaatgtattcctctatgttttgttgagctaaaatgggttctccagctgttatttgacctactaaaggaagctctattatttcttgattagctccagaaacatcatttactttactacgttctaaaacttcaatagctcttggtttagtagggtcctttcttatgtatcccagtttttcaagtttatttagatgagagtgcacagttgaagtagatcttaaccctacagcagtacatatttctcttacagcaggtggataaccttttaatgtgatttgagactttataaattccaatatcaagacttgcttttcagttagatctaaatacataacatcactcatttccaaacatattttgtttttatttccatacactttatatttttaattataacataatccatttatatctgcaaacatttgttcctgatttttaatcgtcctcaatccattcaaaattcttgactatatcacgttttacatttttcttatgagctgcataaagctgagtagttgtgacattatcatggtcaagtaagttttgaacatcatatatagaaaatcctgtttggattagagaagttgcagccgttgctcttaatttatggggactatatccattgtctctagtagtatcaagtggaatagatgtatatttttttaccagtgttcttatagcctttgctgtaattctcttattttgaagagacaaaaataaagcatctttttcttcatcatttaatagttcatctcttgttctttcgttttgcaaataatcttttattacatgttcacaagtatgatttataggcattaaaacttctttcccacgttttctatatattttaaattcacctcttgaaaaattaaaagaggagatattgagttctctaagctcatttaatctaagcccgtatgtaacaaataatgctagtatagctttgtcacgtaatttagtttttctccaatataccttttctttctctgtaagcccttcacctgtttctactgattcaagcatcttagcaacttcatctatctcaaggcgcttaatagcatctggctgaggtttaggaagttttattggattgaatccatcagttatattattatctatctgagagtttctgtataagaatttaaatagagtagagatggatgatttttttcttgctaacgctctattgttattttcaaaaatcaatgtgtttttttctgtatttttgtaatatctactgcaataatcacctaagaataaatttatatctcttgattttattgtattaaaatcatcttctgtaatatcttttacacaatctgcatttgttaattctttggtttcaatcaaatatgaacaaaaaaaattaatatcttctaaataagcaagtcgtgtagaaactgcaacagaaccttttaaatatataaaataatccttcataaatacaggaagtttattttccaaaagtagacatttttctatgagttcattttctttgataacaatattatcaggtttatctgatttattatgtacttttataattttcttatcattattcaaaattaaacctcctaaaactaaaatataaatcttttatattattttttgatatttataccaagtgagtataaatatttaatttaatcattttttacatttttaagagattagcagtgctttagatgaaattatcactaactattccctaaatccacatttaaagactagttgaatttaagtactctttttttatttctcaatatatttatagaaatattttaaaatatattgagaaattttttatgctctactaaaatcttttttatataatatttttatatatttctaacgaaaccaaatattagtaaaatatgtatttatttaactaaagtttttaaatgggctgactaagcttaaaatataggatattatgagagttactattgaaaaaataaaccctattgccataaagaaacttataaatatgttatacttaactattaaactggatatattcaagttatcaaatccaaataagtatgtaattgaacttattacaaaaataactataactataaagctcagaccatttaagctattttttaaatcagcactactaagtgacatatgtgtagatatagaatacattaaaaacataaatataaaatacttcaatgaatatacactaggtgttaacaacattattcttataaaattggaaatatcacctaaaataatgtgtataaaaccatttatatttaaattattaatcatacttacatataactttaaatctatattttgagtcactttcatataactatctggcagtaatatcttaaaaattaaaataatcattattgttccacctataataggtgcaattcctataaagaaatttcctatactttgataaagattatcttttttatagctatgacttacatatcctagtataccatcatttttactttctattggtctgaaaaacttaactgaatttattttatgcatgaaaatcaagcacattatcaaatgactcaattcatgaacaaacgttcctatagctccagttacaataattccagtttttccaaaagatgaaaagataaatttattatttagattttctgtaatgctaaaaatcaatccaaatacaataaatattcctatgaaacaaaaaatatttattacacttatttttaaaatttcgattatataaatcataagttaagtcctcatgtaaaagtatttaactactctacttcatatccattacagcttaaaattttacaagcatcttctatatctttttcttttactaagatatagtctgtatcatacgtagaaattgcaaatatgcttattttgttgtctgctaacaaactacttaacttagataaaattcctacaagtgaaaagtctaaaggacctagtatcttaagtattctccactccttttctgacttaacatcagaaggaatattattatttaaacatacaacacttaattcatcatcagttctagttatagagtaaaacttctctgtatctatccatgttggtattttactgtcattatttaatctacatactgcatactcttctaccaataattttaatttcataatgtatatttcctccaatcttatttgtttacttaagattatacattaaaagttacataaaataaaacatataaagtaaaaaaggttcactatagtgtcctatttctatagccaacctttaaaacttaattaaattctaataaagagatatattatctaggttcaattataagtttaatggctgttttcttatcaccttcgatttctatatcagtaaatgcgggaatgcaaactaaatccattccactaggtgcaacaaaacctcttgctattgcaattgattttatcgcttgatttagagctccagctcctatagcttgtatttctgcaacgcctcgttctcttagtactccagccaaggctccagctacagaattaggattagattttgatgaaacttttagtacctccatttcaacatctccttgttaatttgttaaagtatccattacctaaagtactaaatcataattgccatttactaattacaatcatcatttaaagtatacttttataaaaatatacttctataatcgttttaagaaaacctttattttttttaaccattttattatgaaaaaactacaaatttctttatattctataagcattttccaatatttctaaattttttatatctttgagctataatttcctctttatccatatctttgtaatgatttaatctttctaaaatataagcttttatttcttttgaaacagcttctacatctttttgtgctcctccaagaggttcttttataatcttatctattatttttaaatcatataaatcattacttgtaagcttcataacatcacaagcttctttagctttagatgaatctttaaatagaatactagaaagcccttctggagaaatcacagaataaactgaatgttctagcatacaaacatcatttcctactccgatacctaaagctcctccactaccaccttcaccaattacaaaagtgattactggaacagaaagtttactcatttcaagtaagtttcttgcaatagcttctccttgtcctctttcttctgcttctaaaccacaaaaagctcctgatgtatcaataaacgttattataggtctattaaatttttcagcttgtttcataagtcttaatgcttttctgtatccttctggatgaggcattccaaaatttctttttatattttcttttgtatctcttcctttttggtgtccaactatagtaacattaaactttcctatctgaccaatccctccaaccatagaagggtcatctttaaaaagcctatctccatgaagttctaaaaaattagaacaaatatgttctatgtattccaatgtcgtaggtctctttatatctctacttagtgttaccttttcatatgctgatagatgtgaaaaagcatcttccttaagcttttccaatttctcattaagtgaatttattttatcacttaaatctatattatttgccttagaaatagttattaattgtttaatatcattttctaagacttttattttttcactattattttcaatcaaaacagttcctcctttatgccctatttcttgtgcatagcaagaatttgatataataattccttcatttttcttctatctactatcatgtcaataaaacctttttcaagtaaaaactcagaagtttgaaatccttcaggaagtttttgatttattgtttgctctattactcttggacctgcaaaacctatcaacgtatttggctcagaaattataatatcaccaagcatagcaaaactagcagttactcctccagtagtagggtcagttagaactgatatatatggcaatgatttttcttcaagcttagaaagtgcttgagaagtctttgccatctgcataagagataccataccttcttgcattctagctcctcctgaagcagaacaaataattataggtaaattattttcagcagcatactctattgaataagttattttttccccaacaatagaacccatacttcccatcataaaatcaggattcattacacaaataactgttttaattccatttattcttccataacctgtgacaacagcttctgactcttttgttttttccttataagagtctactttttctttgtatttaggaaaatttagtggattttgaaattctacatcagaattaaactccataaaagttcctttatcaatcaataaatttattctttttcttgctcttaagccataatgtcttgaacattttggacatacaaatgaattttcttctatgtcctttctaaatacatgactatcacaacctttgcaataggtccaaaatttatcatctacactattctttttaaagttgtcatctaaagaaatcgtaacatacttagattcttttgatgataaaaatttttttatcataatctatttactccttataatgtagcaaattctttcttcataaagacatcttctataaatttggtatgatgagtatcttctctaaactcctcacttgttacaagtgccttttgaaattctacatttgtattaataccttctacaataatttcgtctagagctctatatattctacttatacattcttctctagtttcagcccaacatattaacttacctatcatagaatcatataaaggtggtatagtatatcctgcatatacaaaagtatcaaatctaacaccaaaacctccaggtaaatttaatgattctatcttacctggtgatggagcaaaattctttgatgaatcttctgcatttattctacattcaatagcatgacctctaaaagtaatatcttcttgtttaaaaggaattttatccccattagctatagatatttgaagttttataaggtcaagatttgttaccatctctgtaactggatgttcaacttgtattcttgtattcatctctataaaataaaagtttttatctttgtcaactataaactcaatagtacctgcaccgatataacctactccttttactatatctactgcaattttatgaagtttttgtctttcttcatctgaaaggtatggacttaaagattcttctattactttttgatttcgcctttgcatagaacaatctctatcacctaaatgtattgcatttgaatgtttatctccaaatacttgtacttctatatgtctaggattttctataaacttttccatatataaatcactattagaaaatgctgctagagcttctgaacttgccatatcaaaatttgaaaaaagttcttcttcttttctaacgattctcataccttttccaccgcctccacttgaggcttttatcataacaggatatccaatttctcttgcaacttctaaagcttcttccttagttttcaaaacagattctgaaccaggaacaacagggatattcaattccatcatagtttctcttgctctagatttatctcccatcaaaatcatttgttctcttgttggacctataaaaataatattattatcttcacattgctttgcaaattcaggattctctgataagaatccaaagcctggatgaatagcatcacactttaatttaagagcaagatagattatattttctatattattataactcttacttatattatttggtcctatacaaatagattcatcagctatatatctatgaaaacaatctttatctatttcagaatagatagcaacagtttttatacctagttctttacatgttctgatgattctaactgctatatcgcctctatttgcaactagtattttttttatcaacttaaatacctcctactacaatggttttatcttaaataaaggttgattatattctactagttcttcattactaactaatacttcaattatttcacctttaatttcgcttgttatctcattcataagcttcattgcttctaatatacataaagtgtcgccttcttcaactacatcgccaactttaacaaagctatctgcatctggacttggagaatcatagaatgttcccatcaaaggagctactactactgatagattctcattagatgtgacaggtgtatcgtttacaactggcttttctaaagaaagatccactactgattcttgttgtacacttaaaacaggtgaacttgtagattgagcttttttagatacttctaatcttaaatcgctactttcaagttttacatattctaagttagttgagtctatggcctttaataattccttaatttcattgatgttcattttgttacccccttgtattattacctggtgctaatattatatcacaaaaaacaaatttataaaagaaaaagtgctgactagagaatcaacacatcaatatatcttttaattttaaattaacaaccagtaacttatatttgttttaattttccattattaatataaattataagtataaaatgaataaaattcaatattttttgcaaaatacaagagaatacaaattaatacctcgggaatttttaagacaaataccaatattatgcaatttagacttcgctttctttcaaattagtatcattttctttatttttacataggatgtactttaatttagctatcaaaacattactatataggttaaaagttattagaattgcaggaattataaagtaaactctagcacctataaaaccaaaaactactgtaataagtattaatcttttatttaaagtaaaaaaaggtatattaaaaatacttttgtcggatgtttctggagtataagaatatataactccaaaaatcaaagtaagcatacaaagtggaagtagtgtataacttgaaattattcccagaaatcctatactttcaaaatatttgctagcactatttgtataaacaaacatgtatccatttaaatatgcgcatatacatgatataatgccaaaagttccccctaaggattgagtgtaccaattaaaaaatttagattccatatacctcacctcctaaaactgtatatataatgatatgcatttaaatagtaaaatatatctttatatgtttctgaataaaattttgttaatttcattaatttatgtttaagaaatttgaagtatagtgtagtatatattaatgtagatgaagttttatagtacttatttcatagtgcttaatcaagttatcttattatggattcaaaagttgtttgtagggttttatattttgttgagctgaaaaatttattataaatgaagggatgttttcgctttggtagatacattagaatttggtcttaaaattttattttttatattatcaataatttggatgggtaaaataatgattttaagaactgataagcaaatagtaatcaatcctttgcttattggtatatctgcagtccttgtgatgttgcatacctcacagagtaacattgaattttttggattagatgtccaatatataagaatagttttgtatataatatattcactgataattttaataggaatatgggctactaacagaagaaatggaattttttagataatctatttctataaaatttaaaggttgctagtaacaaagcactaatattagcgttctgttactaacaacctttattttgattatacacttaaattgaaaatagaatgattgaataagttgacatattattttacattgacagtgattagaacttcttgagatgtatttaaatcatttttgtcgcttagtataacttttaccacagcttgacctgttttattacctttaattatcatatcttcacatgaaagtacactcttatcacttacagatacaataaagtctaaatcttttggaagattatcagtaacttcccagtatttataataactatcaattttcttcgtaattatttttctcaaatcaatactttcaccttttgctatatcaacattatgatatttagagtccagtttatactgattatcttttgtatcaataaaatttaaatcgcaatttacatccacaccattatgagaaagagaatttactacatcgtcatcaatcaaataattattggcaagatttattgaatccatatcttttagacttaaagcttccttaggaacctcttttatattattattccaaaaaataaaattgtctacattttcaagatatgatattccttttaaatttgaaatgctctcaccagttgcataaaattctccatctaaagcctttatattgcttatagtcatctcatctgggtttatatatctttttacaactgctcttaaatttgcatcaggaaaaatatctttaagttgattttcgctcaaaaccttatcatttgaatttattggacttaaagctgctgcagaaataataaatggtattaaattagctaaattcatagtaccctcccacataaattttttattataataatttaatttctatgagagggttctgtttccttgttatatatacctactttcgtacactttattaatataaattaaaataaatttctactattaaacttataaacatattactagttacgttttttagcttcacatctaaatattcgcataccttgtgacataaatttgtcttcatactctgttgtaacattattttcatactcactatttcctaaatcaagagaaatattctttaatagccaattatttgcagcaatttcatttaaactaaactcgaataatttttcattatctgttttaaagtgaatttcgccatcatcttccaaaaccctattgtacatttctaaaaatccagaatgagtgagtcttcttttactccatctatttttaggccatgggtcacagaaatttatataaattctcgataattctttagcttcaaagtaatccaaaatattgcttacatctccccataaaaatagtatattattcaaattagaagcatctgctttttcaacagcttttaaaagaacttcttccttaagttccatggcaatataatttatgtcagggttctgcttagctaaagttgttataaacttaccttttccagtcccaaattcaacatgtattggattatcatttctaaactttaaattccacttgccttttaatttgtctatatcgtctcttaaaacatattttgtataacttaaaagcttttcatctgcacctttttttcgtcttcttctcacaataattctccttacatataaaaaattagtaaaatacatttttattatacattatctcaccaaaaaataaaaagaactctcttaaaatagaaatttatttctataaagagagttctaaacttactaaaaacttaatcttagtggcaccctgaacaaccagagcatcctcctccaccttgatctttcatattttcaggaataactctaaatccaaatcctgtatcttctattattatatctccatactgactatattcatcagagctcattacaaattgtaattctccaacttcataagttaagtcatcttcttttttctcatctaaagctaatccaaaagaaggacctccacaaccaacacctgcaaagtatactcttatattattaggtttatcttgattgtcttttaagatactttttaaagtatcaatagctgtttctggtaaagtaattttcatcaaatcattccctttcaaatattttattaaaacaatatctattatatacccatacaaggtacataatcaattagtttttgcatattttactaaaacttctacctaatattacctaaggctttaaaatattttatataatattttattaccttaaataaataccctatcataaacttagtaaacaaataaaattattattctaaaaaatataataattttatttgttgttttaatattataacacatttgataatgtccaattcatatatgcaaaatttatatactttaaaatatctaagaaattattcaataaaaaaatactattttttaaaaattatcattattgataaagctctactatttatattttttagtgtattcatgtataataagtaaaagcacaacggtatatactgttgtgcttttttgtaattaataaacaatattttggtctataacaatgaaaaatggctactttccataattgatttcatctgacataagcaaaaagggtgtccagctgggtcaatcataactctccagtcatcagtaaattgctcctctgcgattgtagctccacaatgaatttcatattgaactgcttcttctaaatcattaacagcgaaatccatatgagccatttgctgttgagattcaggtttttctggccacacaggcggtttatactcagaatttcgttgaaatgttataccaggatatgttccctgatttgttcctggagcaccaacacatgcatattcttcattataaaatgctatttcccaattgagtaacgctgcataaaattttgctaattcatgtgggtctttgcaatccatcgtaaatgagtacattttgattttcagttcatcatgcataacgtaattacctccaagtataaatttcttcgtcttttcatttttaagctaaattcaaacattaagtatgtaatttatttcaagtatttttctattatgccccaagcctttgttttttgcaatataaagaaaaaattatatattttaatattttataattgttgaaattgtgtaataaattcaactggatacatagtgcgttttgaaatttcttctaaagctaaaccttgttttaaaagcctctttatgacgctttccatactttctgaaatttctataatatttttatcaaaatcataaaacctaaaagttctttgaccccatgggtattcttttatataatgcaaaaattcaatatttcctattctatttatcttactttcccattgtttgatatcattaacctcaaaatacaactgaaagttatttgattgttgatatattggtaaatcatatccaattatagctttataattactttgtaatccaaatccattttcaaatgatacatgttctcctaaatctaatgtaattttttgctccataacatcttcataaaacttttttgatttatttatgtctttgacaattagcaatactcctccaaatttcatcttatcactatcctttctttgttataagtattataacttaaaattttgcaatttcactgtaaaaatcagacatattagctcggtatttttgaggagttattccacagacaattttaaaatctttaataaaatgtggtatatcatagaatcctaattcattacatatatacatcaatgaagttttattattgtttagaagttttatagatttattaatacgtaccaaacgagaaaatgacttcatactcaaccctaggtactgattaaagagtctgtttaaatgcctagaactataaaatacttttttagaaatttcttgtgaagatatgtttccagagttttgaataatcaactgaattgccaaaataaactcatatgagtattcaattttaatattagaaatcaataattcttccaactttaaaatcaatttatctatagataaagattcattaaatatttttttaatttctaaatctaatgaagtattaattatagaaaatggaacaactttatcaataagttcactttgctgtatacctataagcgggaaaaaaccagcaggttgaaattctataattagtataacatcacatctattagcaatatttcctactgtttttggtttagtagttggaccaaataatagactatgtaaccctgtggcatcataaaaaaacaccaaagttacacttccatgaggaataatcgtgtaattatcagaaattattgtttgatttggaaacgatatagtaaaattcgatatccaattttttaattgcatacaaggcaagagataaacaaaattgtcttcacaaactataagtgacctatttttatttataaaatgaatactttctttttttaacatatattatatcctgtcctatcgtgaatatttattaaagtaagaagaatccatattatctctatatatcattaactgcttttaataatagagatagtatgaatactcattagatatttaataaacaaataaattaaaataatcaataaaaaatatagtacttttatctgttattttaatattatagcacatttatagtatttaacttatatccactttacatatgtctaatttatatagttaaaaatgcttatctcaaatacaataattagtccttatacaattaaaccatctgaaactgtaatagtacgactactacttttggctgcttctggtgagtgagttaccataattatagtttgtccattgtctctgtttattttattcagtaaatctattatttctatccctgttttactatctaaatttccagtaggctcatcagcaaataaaatctctggttttccaactaaagctcgagctatagcaacacgttgttgctgaccaccagataactctcgtggtgtatgtttacgtctatcagttaaaccaactatatctaagatttcatctaattgatttttataatcttttaaatttttaccatctaataacaaaggaagcattatattttcctccacatttaaatttggtattaagttataaaattgaaatacgaatcctatatttctacgacgtattatgctcattttctcatcattaaaatgtgatatatcagctccattcatatacacttttccactcgttggagtatctaaaccacctaaaatatataaaagagtacttttaccagaaccagattgacccatgatagaaacaaattcacctttcattacttgtaaagatacctcttttaacactcgagttgttgtatttccaattttatattctttgataatattttttgcttctacagctaaactattatgtgtaattttcatattaacctccataattattcaaacttaatttcttctatcagtttcattttcttcccttttataataggcactatcgaacctattaaagttactataattcccaataacccaacaataataaatgttttaaaatctaaatctggtttcattgaaatttttggtcctgcaactataaagatagtttgaatctcaagtatagatatcacaataccaataacagctccaagtaaacctgaagtaaacccttcaatcaatgtcacttttatattttgtttatcacttagtcctatagatttatacatagctatagaacgttttttttgaatataattaatcagtagattattaataatacctactgtagcaagaagaaaaatgaaataggtcatcttattcataggagacaaaaaactacttatagtatttaaagaatcattattaaattcttcaactgtacgactccaattatatgtatctccaaataaatctcttatctgaatcataacaacatctggattgactgctgtatatactaaaaaaccataattagttttatcaaaatcattaactgcataatgtgatggtataacagcttctacatcatttgcacgggatttaaaactacctactattttataagaaaaatcatacttatcattagatagagttattgtatctcctatagataagcctactttttttagagtatcttcattcaaaataacagaacgtttatcattaaaagcttctattacttgtttttttatctcaaaatttgtataattgattccaaacatagagttatatagttttatattatctgtaccctctagtcttgataatgttacaccattaccagaaatctcattattcataacataaagaggtaatatttttttaattccatccatatgtctaacattttcaataaactcttcattcatctttccatctgcaaaaccttgtaattctgcgtcacgaaacacatctgttatataagttttgacaaagttaccaacaacacttattgcaataactgcagaaatacttataaatagtaaagtgatattctgtattatatttttgttatttttcatatttctagcagctaatttaccctcattccctaaaatatttttataaacaaactcaaaaactatagacatgatatcagtaataagaggaatcaacacaatagtagctacaattaatcctagtaatgaaaatccaccagctagatacaatgtattttcaggggatattcttggaagtaaaatagataaaataaacattatacttcctataaaaagtatagaacgatttgaaacattcttttcttctactgttcctagtacaatattttttattggcaaatggctagcttttttaacaggtatatatgcactaaatgaagaaacgattattgctactataacagatataatcactccaatgggtgatattactactggaattgatattccttgttcgagagaatttcctaacccatgaagcattaaatttaaaacaactacaccaataggaatagcaattaatcctcctatacttccgtataatatactttcaagcatcaatatacgagttacagttttttcattggcaccaatacttctaaatgttccaataaaaggaagacgttctaatgtaataaccttatagctgctgtatatgataaatatactaagggttaatgcaaaaaaacttattaaaaagaaaggcattgtcttttgtctagcatctgaaattatcttagtttcatttatagtatttgataccatatatttttcagtggaaagttcttcggataatttatttactagattttctgtcatttcttcttctgactctataagaactcttgtatatccactgcctttatttataatttttgatagagtctctttgggtagcagtgcatttacacctcttgtattcctcaaaaatactgtatcataagatgcaatatcactaacttgaaaagtataagactttccataaatctgtaaagtaatagaatcacctttttttattttatattttgatgtaaagcgatttggaagaataattttatcaccagaaaaatcagtaatactatcgccattttctaatcgtggcttgttgattttatttagttgacttaagtctgctgatataagactaaattcttcatagtatccccctttattataaatagcagagctttccaatacaccaacctttgattttatagcatttaaatcaggtatgtcttctaaattggttaatacatctggatttttactttggacagatatagtcgctgtaccatacataccttttgccatttttctttgtgcactttcataagataatccaattgagaatgaaacaaaaagtaaaactgttgataaaactatggacagtaacataactgctgttctaatttttcgttctttaatatttgtgaaaatatactttaatataattttcaaatttacaccttcttcctttatctaagatatttcagtataatatttttatactttaatccaaattgaatctctaatagactcctccatacttttatcattctatttataatatttttaatcaaatcacctccttaaataaaaaagattgataaactactatataaatataataatctatcaaccttaatatattttttatttgaccttaattaaccttaattaaataggaaaggtgatataaaatgagctacctaatccaggtatactttcaacagatatattccctccatgaacttcaataatttgcttcgttattgctagtcctaaaccagttccttctattttttgttttgtattgcttcctctataataacgattaaacaaatttgatgcttcttctcttgacatcccttttccattatcagatataatgatttcaattctttcatttaatgttatatgtacacaaactttagtatttttatctccatatgtaaaagcattgacaataagattactaaaagctcgttttaatagtgtacaatcaaaatcaaagttaatattatctatattactcttaaattcaactatatttgattcatattctggataatttaaaatatcaatggataattctttcaagaatcttactaaatcatatttatttttatttaaaggaattattccattttttaattgataggttaattttaaatcgtttataagtgtatttgtatattctatattctttaacatgattgaagcatatttatatactttttcaggtgaataattagtactactatctgtaagaagctctgcatacccttttattggtgaaagtggagtttttaaatcatgagttatatttgaaatccactcttctctcataatatcagttttattttgtatctcatcacttctatgaatttcttcatttaaaatatttaaactattatatatatcagcaaaaacacctttaatattaactggaagatagcttcgttttgaaatatcactaacagcagatgtaatatttgatatgcactttgttacccagtaaccataagcaattccagaaatcaaaattattaaaaatataatccctatgattgaaaatacaattgacttaccacctacaaatttacttccatcaaaaaacatattcactttagatatatttaatggaaaatatataatataaatatagtcatttttattatttttaattgtattaaagtatacagttccattacttgaattattttggttagctaatgttaataattcagaattagaataataatctttatgctcttttggttctaaaaacccataaactctatttccactagaatctaaaatttgcaaccacaattgattttctcgaagcttttctaatccagactgttttacttgtggcttattatctataaatatgatttgttcattaaagttttctgtaaattttttcggccagtcactacgaataaattccccatttggtttctgaatagtaataagtgataagaaaatacctattactgtcaggattaagcaaataaaaatcatgaaaaaaataatgtatgaatgaaatactgttttataactaggtttatgcatttaatcaactcttttcttaaacttttattttagtttgattgttgcttatataaaatagataataattattgatatgtaaaaatttatttaaaaatacaactatctacataaattatatttatataattatatgttatcaagctgtctgttgtatttaataaatccttttgataacatataaaagcaagataattttttccattaaataccttataattatacacaaaatctctatatacgttaaacagtatagagaaaattttcatagaaccatctttataggggatactttataaaagaataaaaaaattataatatataaaaaacttcataggagtgtaacaacatcagtaaagatatgaaaacactatataaaaattcaaaaatattaagaataatgaaatacttgaaattgcttatatcaagaaattttatataatataaactggtcaaatatgttataatattaaattgtgacaagttcatggaggtgtttatatgaaaaaacaaaagtcgccaattttacttgaaatgcttggactatttttgggttgtatatcaatgagtattggtataaatatgtttttaaaaccacatacaattgctcctggaggacttagtggtctatcattagtactaaacaaggttacaggacttccagtatcagctatcatgttaattataggtgtcccattagtaatacttgcttttagaattatgggtacaaaaaattcattaaaaactttatttggaacagttgtattttcagctatagttcaattaacagacccattatcaaaactaagatttactaatgacttattattgtcttctattgcaggaggaatcctagttggtataggtttaggaataatgtttaaatcagatgcttctactggaggaacagacttaattgcactcatacttagtaagaaattcccaggaataaaagctacaaaattcatgtcatgcctagatggaatggttgttatatcttctggtatagtaaatcgtagtttagaaactgctctttactctggtatagcactttgtgtattaataaaaatagcagatatgataatggaaggatttgaccattcaaaagcattttttattatctctgatgagcctgaaagtttaagacaagctataactgaagaacttgatagaggtcttactattcttgatggtaaaggtggatacactagagaaaataaagaagttctattagtcgtagtttctaaaaaacaagaactttatctaaagagattagttaaaagaactgaccctactgcatttgttattgttacagatgtgcatgaggttcttggagaaggatttaaaaatttagagaactaataaaaattaatattttaagtatatatactattttaattaaaatacgatttattcaaaaagagtgtctcataaactttttagttcatgagacactcttttttgtataaaatcaaatgcattttcagtattttaacaataaaaaacaggattatctatattttgagtcaactactttattgaaattttatttagaaaacaatcattactaaataaccaggatagatattaaatgattatatctattgttttttcaattcatattgataacaaggaacattttttacagtatttccagtatgaatttttttgatatactttcctgtacatttaaatcctaataaatctaatgattttgtagaattttggttttcttcataggttattgcaattattttatttaagtttagttctctaaatccatactgtattactctttttgttatctcagtagcaaaatcatgtccccaatagcttggatttatacatatacctatttctgcttctaatgctttaggatttatattattaaaccccatattcccaataactttattgtctcttttatatactatagcaaagtggccaattttcccttttttatagggatttagaaaaaatgattttataaactttcttgtatcttctaaagatttatgctcactaaatggtaaatgttttactactattttatttttataacagtcaaaaaaatcttcaacatcatctaatgatgcaggtcttagtatacaacttctagtttctaaggttttcatttgaggatattcagaatcagacatttctaatccccctttatacattaatctaaatatactgttcatatttaaaatacgatattaattatataaatgttctcaaattaaccttatctttatttttaataaaaactaattactatatgaatctttcaaatttacgaatttatctctatttttatattaaattacttgtgaaatatgtattctaaattatatgttattagatatcatgcttaaaaattctttggttgctaaggataaagatatatcttttaaatggcagtaacctatatttctcttaggtattggctcttttatatctaatttaaacaatttctcattttccaaataatctatgctaaattcttctataacacaagacactccaagatttatatacgcaaattctaaaagtaattcatgagaacccaattctatatccgggtttagttttataccttttgataaaaaatattcatttacataaagtcttgaatttgctttattttctagcattattaaaggcaatgtgtttaattcttccaatgatattttcctacctttgtattctatgtaatcatttgcacatacaaatatatcatgtatttcaatacactcaacaatatttagtgtatcatcttctattggcatgtttataattgctatatctatattcccatctttgagtaaagatataagttctctactcgttctatttattgtagatacatgtatatgtggatacttcttatgaaaaatttctaaatattttaacaagaaaaaacgtgcagctgtatctcctactcctattttcagagaaccgtattctaattttttaaatttatttattctatcttctcctgatgatatcaactttaatgcagtagtgacatgttcacttagaattttcccctctggagttaattttactcccttattgtttctataaaataataaagtatctaattgttcttctaattgctttattgactggcttacagctggctgtgacataaacaattccttagcagcaagagaaaaactcttattatttacaactgcattaaaaaccttataaagttcaagttttatattcatatataattactccttatgtcaaatattagtattatttattttacttataattatatttgaattataatatacatggtactaatatgacaatattaattctttaggaggattttagataatggatagattagttggaactgtttcaagaggggttagagcacctattataagacaaggagatgacttagttaaaatagttgttgattctgttttaaatgcgtcaaaaagtgaaaactttgaagttagggacaaagatgtaattgccgttacagaagctgttgtagctagagcacagggaaattatgctcacgttgacaatattgcaaaagatgtaaaagataaatttggagatgatactgttggggttatattcccaattttaagtagaaatcgttttgctatatgtttaaaaggaattgcaaaaggatgtagaaaagtcgtattaatgttaagctacccttctgatgaagttggaaatcacttaataagtattgatgaacttgatgataagggaataaatccttggtcagatgttttaacagaagaaaaatacagagaactatttggatataacaagcatacatttactggtgtagattatgttgattattataagaatttaatcaaggattgtggtgcagaggtagaaatagtatttgcaaacaatccaaaaactattcttaactatacaacaagtattttaacttgtgatatacatacaagacaaagaacaaagagaattttaagacaaaatggagctaaaaaagtatattcacttgatgatataatgacagcaagtgtagatggtagtggttacaatgaccagtatggacttttaggttcaaacaaagctacagaagaaacagtaaaattattccctataaattgcgatgaagttgtaaacaaaatccaaggtaatataaaagaaataacagggaaagatgtagaagtaatggtttatggagatggagcttttaaagaccctgtaggtaaaatatgggaattagctgacccagtagtatctcctgcttatacaaaagggctagagggaactccaaacgaagtaaaattaaaatacttagcagataatgattttgctgacttatctggtgatgagttaaaagaagcaatttcaaaatacatagttgaaaaagataataaatctgatgatttaacaggaaacatggtttctcaaggtactactccaagaagattaacagaccttataggttctttagcagatttaacatctggaagtggagataagggtactcctattatttacatacaaggatatttcgataactatacaaaatagtatgttttaataagatttaatttttttggattatatatattaacatgaaaatttattaaaacctcttaatagatatgacttttcaagagttatatctattaagaggtttatttaatgttcacagataagatatatttaaataatttaaacaagattgtcataaagttatataatcttaaaaatttatataactctaactcttatttatttctgaaataatatcactcttcaaaatttgtcttactggaataattacagcaactatactaatagtgatatttaaaataatcatacctatgtatagaggtgtatttattttaagaattggatttatatataaatatacacgttttaccataaaataaatcataaattgtccaataacacttccaattaccattataatacttgcatagaatccatataaaaaaccttctcttatcatcataagtaaaaacttattatccgtaatacccatagctcttaaaattccaaactcatgtcttcttgaaaaaattaagtagcttactgtattgattatatggaacaaacttattgcaagaagtacaaatacaataccatatataaataagagtttttgatttaagtaggtattatttttttcaatagcaatggtataatctgttacgatacatctttttacatcacttacaacactttttatgttctcagacaattcctcactgttactatcttctgtcttttttatacttactgaattataattttcgatatcaaagttatttttcatttgcccattcgtcataactatatccataccataatcaccaatgaaatatatgttatttgccatcacacgttttacagtagcagcaactacaaattcttttgttgtataatcattcttattttcttctttaaatttaacaatttcacctgttggtttcattgtctttggcactttaacttttattgtatctcctggatttatatcaactgcatcatacatcccagttccatccataggtagtctaactataaccttattatttttaaccatatcatgggtattaatctccccatctataatataagaatttaatccttctaacataccattgttataaccataaatatttgtttttaaaagatagccaccttcattttgctttgtacaaataccatcaaaaaaagtctttatcctgtaatctttttcaagaggtttaaagaaatttttccaaaatagttgttcttctttaatttgcatagctccaaataaatatcttactggatagacttttgatattccctcaacattgtttaatcttgaaattttatcttttggtatacctacatcaaaatctgttgtttgcatagttatttggtagtcagaatttaaaccatcatcagctttcattgtaagttcattattgtttttagtaagctgtatagagtaactagaacatagaaatataattccaccaagtgataatgaaaacaaaattccaataaacattccccttttttgagtcatgtatttatgagataatacttttgtcatgttagagtgttttacactttctaatattctctttttcttattagtaatcttaaagtttttcatagattctatactagagtatttattcaactgatgtacaacacgtacagcaattaaaattaacaacaataagataaataaaaagcctaaataaatagatttttcacttataaaaaatgctcctggaacaatatcactactcaaaaatatatgtggaaattgttcatatattgtagacgctactccaatacctaagaagcaacctataggaaatccaacaataaaaagtaaaaataactctaaaaatagtagaaataaaagttgtttattattagcgcctaatacttctaaaaccccatattgtgatattctctgaagtattgaaacatggaaaatactatatactgctgctgcaccaaacactccaacaagcaatataattgcatttgtatttagttctaaattttttaagaactcaaatatattatatttttctatattctttggtggttttactccaaattcaactgaaagaggccagtttatataagttttttcttttgatatgttgaattttttcataaatttataattttgctttttaatatttttattttcatcatattttacataaactatataagaatccttttctttaggctgcaaataatcgtttacaaatccctccatagcagtttctgggtttgaaagacttgataaaataccacataacttatagattttaccatctaaattgatttctgttccaatttctttgtttacatttaaattgtttagagaatatgtgtcaagtactatctctccatctttactaggaagagttccttttaataattttctacctgtcatgtctaaatatgaagaatcagcatttaaaaattctataataaaaggttcatctatctgatttttaggttttgtaacgccaagtctatctacaatgtattcctttgattttttattttttttaattttattaagttgttccttatctactttatagaaataatgataatctccactatcttcccttatcttttcaattctacttttgtctgcactatgaactaaagaaccaattcccgtcaataatgctactgatagtactatgcttaaaactatagatatagattgttttttataatgctttatatattgaattgaaaattttactagagacatcatagtacttcaccaccagtattcaccacaactccatcttcaatatggataattgagtcgcatacttgtgctatattttcattgtgtgttaccataagtatcgtttgatggaattttgcactactttcttttaataaacataccacttccattgtagttttactatcgagatttcctgttggttcatctgctaatataagtgcaggtttatttgccaaagctctagcaattgctaccctctgttgttgaccaccagatagttcgcttggaaattttaaacgcttatcccaaattcccaatgtcttcatcagcatttcaatatattcatggtctatatggtttcctttatctaatgtaacaggaagagctatattatcataagtgtttaatacgggcattaaactgtagttttgaaatataaatcctatatttcttcttctaaatactgtcaaatctttttttcctattttagatatgttctttcctttaattattacatcacctgaggttggattatctaatccacctataatatttaacaatgtgctttttccagaaccagaagttccaactatagcagtaaatgtatctcgttcaatttctatacttactccatttaaggcttttactttagtctcaccttttccatagtgtttcactaaattattcgtcactaatatactcatttaatttctcctttcaatacagatatatgttctataaaatattgtaagtgacgataattacactcatcctacaaagttagtttaaactcttacaattctgtaagaatatactaaaacaacatccacttcctagtttagattctactataatgtttccattttctttttctaaaattaatcttgtaagatatagaccaatccctgtgccattttggttttccacatttttacttctgtaaaatcttttaaaaatatcatttagttctctactatcaatacctattccttcatctttaatagtaatcttcgtatatagctccatttttattacagaaatagtaatcgtgctatctgatggtgagtattttattgcattttctaaaacatttacaattgcttctatggtccactttttattatgaactaactttatatctgaaaatggttcgagatttatccttatatttttagcttctgatttattaaagatagtactgatgctttgaataagagtatctttaattagtagttcttctacttcaaattctataactccatcctctaatttagtcattttaaataaggattgtaacaaccagtcaatcttaaaagtttcatttttcatcttttgtaaaaactccttcttctgtaatgtggaaatatttatattctccagaagttcacaataaatggttatatttgaaagtggagtttttaattgatgtgacatatttgatattaaacctttaatcgcttctttttctgactttgactgttctacctctatttctatcatatccttaattttttttacttggtgagaaatttttgacgctcttgtatccttcgtatctggataagtaacttctttaccttccaatatttgatttaacatcaaatttaattcatcatatcttctttgatttattttagtagatactataaatataacaactgtacatattataaaggctaatataaacatattattctacctcattccataaataacccattccataagctgtttttatatattttggattagatgggtcatcctctacttttactctaagtcttcttatatttacagatacaatattatcatcaacataattttcttcgctgtcccaaatatggtgtaaaatttgttcctttaataatatctgacctttattttcaattagataacttagaagcttatattctacagagctaagttccaaacatgctttatttttatatacttttagtaacttttggtccaattttattccattggaatatattactttattattcgatttttttcttattgctactttgactcttgcctttaatacagataaagaaaatggttttgtaatataatcatcaagccctatttctaatccttttacttcatcaatttctgagtctcttgcagtaagcattataattggtatatctgacttttcccttattatttgacatacatcaaatccatctccatctggaagattgcagtctaagattataaaatctatatttttactattaaatatatttaatccttcttgttttgtataagccttaaatacattaaatccatcattctcaaatgcataaaaaagaccttcatttaagtttatatcatcttcaataattaataagttcaattttactctcctttagattttttagataaataattattttcttgcattatcatactaaaaatattttaattttatttatttcactaaaaagattgtatttaaatttgttttcaaaataaaaacatcataatcaagcatatagttatatatttcccaatttaattacgcttaaattgaaaatataacgttattcttatataattaaattatacaacaataaagttatattttttaaatatatttttactagggggaatagaattgaaaagggttgatgagagaaatactatgtttgcaagagcaaattacaaaaaagatagtactgcttataatgattattataagaaaaatcctgacaaaaaagaaattgatgatagtataagaaatagaccaaatttatgtagtgaaggaacaatgacttacaatgagttaaactctccaatggcaagtagtgcattcgattttttatctgatatcaaatctttatgcgaaggaaaagtttctgatactaaagtagatgtagatgcaaagtcaatgacaaaaaaaattaagggtcttgcaaagcagtatggagcttctgtagttggtataactaaattaaaagactatcatatttatacaaataggggtagacatgaagaaaattacggtgaagaaattaatctaactcataagtatgcaattgtatttggatgtgagatggataaagaaatgataaatagagctccaatgatatgtgaagttatagaaacatcaaagtgctatgtggatgcatctatcgtcggcatgattttaagttactatataagaaatttaggatatgatgctagaaatcatatggatgctaattatttagtaatgcctgtttttatagctcgtgatgcaggtttaggagatataggaagaaatgctatacttacaaataaagattatggctctagacttagattaggtgttgttactacagatattcctcttttagaagatgaatatgttgattttggactagaagatttttgtaaggtctgtaaaaaatgctcttttaactgcccttctcattcgctttctaatgatattaaaattggtgatgatggaaaatataattgggtaattgaacatgagacatgctatattaaatggagatatttaggtacagattgtggtatgtgtatatctgcttgcccatttagccaaaatctcgaaactataaagaatactacttcatttaagggtaataatgagcttattcaaaaagctttagatgagtatacttcaaaatttggtaaaagaatatttatacctggaaatccatcttggttgaaataattttatttaataaagaatctgtactagaatttatcataggacaggttctttattaaatatataaatttttaaatactttttctcgtttataacaattcagcaatgtttttagtctataattgacattataaaatattaaactaaaaggagtaactgtatggaaaaaatattagtagtagaagatgattctatattaaataaaactctatcatataacctaattgaagatggatatataattacttcaaaatttacagctaaatctgcactaaagtctatttttgaatgtgaatttgatttaataattttggatattaatttaccagataaaagtgggtttgaattatgtaatgaaataaaggaaaattacaatataccaataatttttttaactgctaatgatatggaatgtgatatgattaaaggctatgaacttggagctttggattatataacaaaaccatttaatatcaatttatttaaacagaaagttaaagcttttttaaatcatcttacaacaaaaacaaaacaagattactatagggatggatatcttgaaattaacttttctgagttatctgccaatataaatggaaatcaaattatatttacaccattagaatatcgtactttaaaactgcttactgaaaatcctaaaagtattttaacaaggaaagtacttttagaaaaactctgggatatagatgctaactttgtagatgaacatactttaacatctgttataagtaggattagaagcaaaattgaaaaagacaatcttaagtatatcaaaacggtatatggtatgggatatatgtggttaggtgaaagaaatgaattttaaaaaattttcttttagttctatttatttaataattgctgttggtataatttttacagctattttatttaatatttcaatttatctaataactgatgatttaaaactaattgctctattattaatatatacaatagtactttgtggatttatagcattaataatatttttacttcataaaaaaatagttatattttgttctaaaatatgtcacactttagatagtatgatgaatagtgaagacaatattgaaattgaattagaagaagaaactattttatcacgtatcaatcacagattaattagaatgtatgaagttattcaagaaaatcgcaatagtattgctatagagaaagctgatttacaagaactagtttctgatctatctcatcaaattaaaactcctattgcaaatttaaaaatgattaatactactctactaaatcaaacatttaaaacagaaattcaaaaggattttttaatggatatggaaaaccaattagataaattagattttttaatgcaatctatggtaaaaacctccagactagagacaggtataatcacactatctaaaaagaaaaattcaatttatgaaacaattgctacagcacttagtggaattttgtttgatgctgaaaaaaagaatattgaagttacagttgattgtgacccaaatttatatataattcatgacaagaaatggacttctgaagctatttttaatatattagataatgctgtaaaatacacaaattctaatggtaagatacgtgtagctacagaatgttgggttatgtatacaaaaatagatattattgataatggaaaaggaatatcagaaagtcatcaagcagaaatctttaaaagattttatcgtgaagaagatgtacatgacatagaaggtattggaataggtctatatctttcaagaaaaattatatctcttcaaggtggctatattaaagttacatcagatattggaaaagggtcgactttttctatcttcttacctaataaataaatttttaaatattttatttgtaatgattctgcaacattttgattttatactgtatttacaagatgttaaggaggtattattatgagtattttacaagtaattaatttaaagaaatattatggacaaagttcaaacattacaaaagctcttgatggtgtaactctatctattgaaaaaggcgaatttatttctattgtaggtacatctggtagtggcaaatccacattattaaatatgatgggaggattagataatcctacatctggaaaggttattataaagggtaaggaattatctactatgactgatgaacagcttacaatctttagacgcagaaatataggttttatatttcaaaattataatcttgttcctttacttaatgtatatgaaaatattatcttaccaataggattggatggagagaccatagataaggattttataaatgaaattataaatatgctttctcttgaagaaaaattatatgatatgccaagtaatctttctggtggtcaacagcaacgtgttgctatagctagagcacttgtaacaaaaccagctattatactagctgatgaacccacaggtagccttgatagtagaactagttcagatgtactgagtttacttaaagtgacaagtaaaaaattcaaccaaacaattgtaatgattacacacaataatgaaattgcacaactaactgatagaattattcgtattgaagatggaaaaattgttaactaggaggtgtagtatatgtttagaaataataatcgcacatttataagaaaaatagctttaaatgatttaaaaattaataaacttaaaacatatctttcaggtatcattataatgatttctacatgtttattattaacagtgaccttagtttcatataatgcttctgtagatttagttaatgcatctccatatcatgctatatataaatctgtagatgaaaaagcaaaaaatatactatataaagataaaaaccttagtggcgtaggaacctacaaattaattggaagtaataaaaagacagactgtattatgtcgattgtttatgcagatgatacagcaattaaacttatgaattttcaaccattgaaaggcaaactacctacaaataaaaatgaaattgctatttcagaaaaatatttacaggaatttggtttagataaagatattggagatagcattaaattaaattattatgatgatattacgaataaagaagttcaatgtgattttattattgttggatttctagaaaattattatcaagataatgccaagcaatactatacagtcgtttcaaatgattattttaagaatatagcttctacacctttacaaaataaaagtaatacttttgacgagtcaagacctgatactgtagatgtattagttaaactatcagaagaaaatacagagaaagattcagcttcaattaagacacagttaaagaaaattggtttatctttaggtattaagaaatataatatatacttaaatgataactatattgaatcaaatttaattgatggtgagcagattattacagttttagtagttggaatagttgttcttttttctagcgtttttgttatatatagtattttttatatttcagttgttaattcagttcagatgtatgctaagttgaaatcgttaggtatgacttcttttcagttaaaaaagactatttctctacaaggaaatattttgtcaattatttttattccattaggggctatagcttcttgtataattgcttacataattcaaccattagcatggcaaatgatagctgatttatttataattttaattttatcactggtaatgtttttaactgttagaatttctttatttaaaccagctagaattatttctaaaatatctgctattgaagccatgcaatatacagaaactaaatttagaaaacaagcaaaaaattttagttatataaatataaaaaatctagcattaaagaatatcgagtcaaatagaaagaaaaatttgattgcattaatatcgctaagcattagtggagttttatttatttcaatcgctaatcttgctaattcaatagatttcaaaaaacaactatctcaacaatttgtctataacgaagattatataattagcattaagagtgataacttatatgagcatattacagaaatccaacaaaataatccactaacagattctcttaagaatgaaattaaatctattcatggagtaaaaaaattaattgaatccaaatcaattaaaagtaatattatagaaccttacatcaaagatagagacgaaaaacaatttattactctaattaaaggtattacgcctgaactttcaaaatcacttgaagaatatattgtcagtggaaaaatagactatacacatttagattcagatagtttaattataaataaatatagaacaaaatcttatggattaaatttaaaagttggagatacagttacatttaatatctttagtggaaatgatattattaaaaagaaaatgaaaattataggaatcattgacaattccaatacaggaggtatgttttttgcttcagacaaaactttagaatctctaacaccatataatacaaatttagatttttctattttaatagataaaaagcattctaaagaagttgaagaaaagttgttaagtataattcagaaaaattcaaatttaatgctttattcatatgaagatgattatagaatgattactagagcatttcaatatataattatagcttcatacatttttgttggtttaatttcttgctttggtatactaaatatgaccaataccctaataaacagcgttttaattagaaaaaaagagtttgccttacttcaagccgttggaatgacaagaaagcaactgcgaaatatgctttatagagaaggtctaaacataagtatcaaagctatatgtacttcaagtatactaggttattttggttcaaatctactttgcacttttataaaagatgtaattagattagactttattaattttaaattttctatatttactattttaattttttcattcgtattaattggtatacaagttttagtgactgaattacttataagaaatatagaaaaaaaatcacttacagaacgcttacgttctcagtaagaatgtatataaaaaataaccattttttatacaagttttaacataattttttaaaagctaaaaggatagaaaattttgactttacataattttctgtccctctacttgtttttattttatacagatacacttccttatatctccaagcaacatcaccagagacataaacaagcatattccttattttctaaatatgtcaattgcatgacttgtaactcctactaaatcttcacgttcacaagtagcaaggtgatattttaaatataacgcaaatgcatcatcatccatagagtctactgcttcacgcatatacaaagccaaaccatctgatgcgacataatgcagtctagttacattaaatgcagacatcaaatcatcaatgttttctttacgtacaagctcaaacaaatcctttggttcagacttagcagcaaatgtctgtggatcaatcaaacctttttcaatatattcagatacattaatatttcctctatggaacccctcgtcaatgagacagccatcagatataacgtatgcagcaaaaaccacaccaccaggttttgttacacgaattgcctcatgtaaagcttgttgtttatcttctttgttataaagatgatatagtggtcctaacagtaacgtaatatcatatttattatctgggaaaacagataaatccatagcattaccctgagtaatgcttatattttcatttgattgagtatttttatggaaaacctctatattatgttcgactaattccactgcgtcaacatcatatccctgacgtgccagtgtgtgagaataacgaccagttgcagcgccaatttcaagcacacaatcacctgattttatgtacttatcaatgtaatgcatagtagtgagaaattccaccattccatgttttaatgcaagtcgactatcttcatcataagtattataaaagtcaattaagtattgttttgtttccataatctcacctcttctatattagttaataaacatcaaatagacaaattccaatctggtttttcttgtcttataaaagctgttaatatatttttcaacattttttcagcactatatctatctaatgttaatttttttgttgctgttaagacagctatgccatgagtataaagaaataaatctaaaaatattacttttgcacattccaactctattccaatgctttccgaaaaaagtcttgcctttttttcattgtcaatttctttataaaaatcattcgcctctttcatcatcaaatctaaatcatttataaataacaacttaaataaatacgtttcttcttgagcaaattcaatgtatgaaagcggaagcagtaaataagggcttacacttttagaattacgataattaacaacatactgattataatattcatatgcaaaagcaagaaattcattttttaattcattcatgttttcgtaacaagtaaaaattggtcgagtggaacactgtaatttacttgcaatactcctcgcatttacagcttcaaatcccacttctcttgtaatatccaagactgtattcaaaatcatttcttttgttatctttactttaggtggcatatatgttcacctctccattaaatttttataaaacacatatgttatataactatagtaacatatcaagaaattatgtcaagaaaaagctttgcatttttttgcaattcctaaaacttataaataaaacatgagttgcaattaatctattaatagataacagcaactcatattttcctttaaatactcttctttttgtctaatatttcatatacacaatcttctattgaattaatatctttttcttttctttttttagaatcaattaaaatgaaatacagtataaaacctacagcaagtccccatgttccgcctttagcagcaattacacctcccataagtccaatcaatcccttctcaacacctgtattacatagctccattgatagctttgtacataaatatccttgaactaaaagtgttactgacaatgctaatggtataagaggtgtagcaatctgcgcaattggataaaaacagataaaaattgctgaaacccatactaatgtacccatgccactaaaaacagactgcatggcttcctttccaaccttgtacctttgagcaacacttcctgtaagtgtcgcagctaatggaccgcacattggtatatatggagaaaagattgccataaaaatatttcttatcccacttataacattagacctatttgaattgaaatctatatattcatcttttctattttcactttcagaaagtactaagttttcacctgttataaaatcaccaaaggcaattatgtatatcataaaagccattggtatcccttgtataaataacattacacttggaaaacctattccaaaaggagatactgtatttatcagatttttaaaatctactatgtaaactaaattgtcaaaactaaatctaggaatttctatttctttactaaatatacctactattaaactcactaaaatagctgatactacaccatattctcctaaatgaaataaaaatttattcttaacttttagagtatcaaatctttcagaaaacattacaaaacaagcaaccaaaattcctactgttatagatataggataagaatcaaatctccctttaggattaaactctgatattatagtcgatataccgacacccattagtattccacctttaatagaatttggtatcttactaactaactttccagctacaccagttatacccattaaaataaatattattcctaaatctatttgtaaagctgttaatgcttgtattctttcaatgcccatgctgaactttaacaaatatgcagttgtaagagttatagaagctgtaatccagccaggtacaactgggtctcccataaaaacatgcaaacagtataatattgagttaataatagccatactccatgccacttcatagggtaatcccaaaatttgtgtactaaggccaattgtgcctaaacttgtcatacttgatattataccttgaatagcttctggtttctcaaatctgtaatgtataaatggaattcttatcttaaacattccaaattttatatgaggttgttcccttctagcgagtctttccataacttcactccacctttcaataactcttataagtttacaactttataattgtttataaattgtcaatgtcattaaaattagtatataacatgcaaattatataaacaataaattaaatctataaaattgatagattttgtgcatatatagaaaaaccgcttcatttttagttacttaaatcacttaatattagttatttaaatcacttgataaaagttttttataaaattcaatagttctattccatgattcaaactgtccttttgaatttccttctacagttccacctgaagaaaaaatccctccactcatactcatacataaagtctcctttagaggcataatatatggaattggtaacggatgacccatattattgtatgttaataattctacgttatatggataattattttcttcaaagatttctaatgcctctaaacaagcttcataactattccatatgttatcttcttttccagcaatcataagtatatctgctttggaattttctatttttattctagcctcttttctattctctgctcttttaagacttttcttataagtactattaaatccaaatggaataccttttgatatattttttttctgttcttcaaagaatatatcattgtctactttgatatatggaaatggctctcctttatatgaccatgatgaagtatcatttccactcatcaatccattaagagcttggaaacaataaatgtgaggttgtgatactacaacctttttaatttgttcatatcttgaagcaagtaaaaaggccaattctccaccctttgatgtcccatgtacaaatatttctttagtactggtaatttcattttcactaatccactcaaatactttttcaaaatattctaatggaacctcttctaatttatctggtaacccttctaaagcaaagtatgcaactgttagtacattgaatcctctagatgcaagtggagctgctaaaaggtctagagcgtctaaatttccatcagaaccacctagcattaaaattgttttattattagaattttgtttataaaataattttcctataaactcatcagatatgtattttgtggtaatatcttctgatttaaatattctctttaattcaacttcttttctttcagtagaagtttcaaatatcatattcataattattggtttatcaatagatatattttctgcaaaatttttaccttcagttttagatttttccagcgaataaattaaccccatacaattatcagccttataagtaccttctataggttcaactaaatctaaatctacttctcctttttcatttgaacaaaacactccataagatgaaaattcttctcccttgcaccatggaaattccattttcacacttattttaagtttagtatttggaattaagtctgaaaccataatcttaagtctttcatccacaaatgattctacattgtatacatttactttcataatctatttctccttataataattatttatgctttatatataaaacaactttatctaatacaacataaataaatttttaaattaagacaccatattgactatttcattttatcaacatatttcatttttgtcaatatattgtcttttttagtaatttaaaattatgtagtctatatgaaatccagttgatttttggctaattaaagataggaatgctattaggtttaaaatatatctattcaaaataaaaaaccactcattttaagaatggtttttaatataaactatttgttattaataaggatatttttttatttaaatttatataattgaacatctaatatttaatgtttaataaaattatgcatttgcaaaagtatatatggcattaactcttgctacatataaattctcatcactacatccaatatatctagcatatttttcaatcttttcttttgcattttcaacatcattttcatcgctctccattaactcatttatataaatatccattaatgacgctttatattcttttatatcatagcctaaaaattcagtcaatctctcaatttccttactaaaatctccatcttcttttaccaaaaattcgtatacatcttccctatatggatttaaagttattatttgttttactactttgcattcgtcagccttcccaataaaaccatctttataattattaaataaggcattagatttttttatagattcttcatcaatataagaatgtaccgcagttatacgattttctataagggcatctacaacagcataatgaattttaaaacaatcattgtataaataattgctcattttctttattgtcgattctatttctaagaagctagcgtgcccattttttttatttttatttggtataataaaagttttattcaagttattaaaaagtctcttaaaatctaaatatttttcacaataaacgcttttaaaggtatcgatatctatagttataattccaaaacttactatagtctcaattcctttcttaaaagactcttctatatatttttctcctaaacttaaacctctatcagatatttgctttagattttgaaaactatttaaacaatctctctcaaagtttttagatatttctaaagcatataatttaaagattttccttatcttattataattattttttgtatcatcaaatctgataatagctccatttacatcaaaagtaatcattgagttttaacctccccattagtttcatcaataaaataaatttaatataaactttataatcataatattaaacttatttatactataattattaatttgatgataaaagctattttccttctaaataaaaaatttgtctaaagtttctaaaaaatttagacaaatcttaggttattattctttaaattatttttaaattattccaaatacaccaaataatattggtataaatatagctggtaacaaattagctacttttatattcgttaatttaagtacatttagaccaagtcctataattaataaacttccagctgctgtcatttctgtgactacaggatcacttaaaaatccatttaaaaatgatgctcccacacatataataccttcatacaaaaatacagatattgcagaaaacattacacctatacctaaagaagcagtaaatataattgaagctattccatctataacagattttacaaataaagtatcatgacttcctgtaagaccactttctaatgaaccaactactgccatggctcctatacagaataataaactagatgatataaaaccctctgctatagaatcttttttatttcctttagaaaatttactttgtaaaaaagcacccaacttatttacccatttgtcaatatctattaattctcctatcagagcacctacagctacggatattattgtcactaatgtgttttttccttctagtgctcctgatataccaatgtacaatacacataaggcaattccattcattatagtatcacttactctttgaggtaatcctccttttattataagacctactatacatccacctgcaattgctagactatttgctattactccaaacattttttctcccctcgattagctaattgaaatttatcctattattaaaacctaagcatctatactttgtattggatattttaaatattccaaaaattcttcaaaaccttttctagatatatttacagttttagtatttatgttaggatgaaaatttaagtaatcttctttaattacatctttatctatgtaaagctcaacttttctttctgtatcatttattaatgaaaaaggatttacacttccaggaagaagtttaagtacattgtatagtctttcaggtgaagcaaacgataatctagaacttcctatcttatctttaagtgagtttaaatcaacttgtttttctcctttaactacaataagataatacttatttcctttggcatttcttaaaaataaatttttacattgacacccctttgttattccatctaaaatgactaattgctctgctgtatatacagcttcatgctctactacatcatattcaacatttaatttatccaaaatatcatatattttagtttcattcatgctagattcattttcatcttgttcttttttattatttaaatcactcatacttttctccttaaacacttcatcataatatcattgtgaggtattattctactatagctattgctcttactggagctccatcagcatcattatacttaaatggtgctgctataaatagaaatttttctggaacattttctaaatttgtaagattttctatgattatttttcctttttcaaataaaatatgatgcacttcaaatactgatgtgttatatctatccactgatagcatatctattcctatgccttttatattagtattagctatatagtttgcagcttcttttgttaatgtaggataacctacatagtactgctttttatcccaaaattttgaccaacctgatttaaatattataaaatcactattttttatttcatcttcatatttttttagatattctaattctatattctcatttcccttttcaagttccaatacataagctttcccaacaaaattttctatatccaacttatctagggtctcacctttagtatacatatgtcttggtgaatccatatgagttccattgtgagaaaatacactaattaatgtttcttgataaccattttcttcaataatagctactttcttgatatctggtctattaggctctgcatatacaggcatgtcattatgtgtcacatgagttaaatcaaaaaccttcatctttatataccccctatgtttttattttctattatatacctaaattcattttatttctatcagattttattccattatataccatactactatatattttttataaacctcaagggatttaccgaaaaatcttggaaagaattatcagtaaatataacatcttcacccaaaaaacgtttataccttccttcttctttctttaaagtaattctctgtttttgtgaatgattattaaaaaccattatcttaagaggaggtttttttctattagtctgcactctttttaacatgtattttatgtgcatatcagcttcaggaaatgaatatccacaaaatattaaaaggtcagtatctcttaaagttttttctgtttcattccaaacattacttaaaaatatgtttgacatattcttaaaatatgttggtggcactataataggttctgttaactcaccacactctaaacattttgtctctgaactattttcaataagcttcatgacaccaccttcatgtggtgtaagagttacactattacaaatggggcaataaagccaattcaatgacccatgtatcttatataatttgattaatggttcttttggttttctccaatttaactcctctttaaaatttgtaaactccacaccataatcaagcataattggcaaatcattcttatctcttaatccagtaactgtattgtctatatgtatatcataatttgcactaataaaagtagtatcaagaagcaaatcattttccaaaagattttcaactaaaagtttatgatatttattatctgttctaggtgtattatgaattgcttcagccattagcagtattaaatattgtcttaaaaaacgtatactatcacttctgttatttagattttctagtccaaaatttctaaatgcttcttttctttgttctgctaagtctaaaagacctaaaacttcttcaaaggtaggaaaatttgcattatctatattatcttttactatatcaatattgaacatctgtttaaagaaaatatacaattctctattcattttggtattataatttgtgggatttagttttttaaaatattcgctaaaaagttcattttgaataggtagattctctgctgctgaagctcctgctcctaaaaatattgctattttcatatagttcctcctaatataaatattactcctatttttatatccattaaatatccatatcatttattttatgatacaacaataaagctgtcttttactagaaaaaatcctattacaagacagccttatattatattaaatctttaataattcgtaaatagaaagagcatatatttgagtagcttttataatatcctctactattaagtattcattagcttggtgttctgtttctggttttcctggaaaaatagctccaaatgcaacacaattatctaaagctcttgcgtatgttgctcctccagatgaaagtggtgttccatcaagaccagtttcttcttcatatacttttctaagtgtcttaacaagaagagtatcttctggaacatagattgaatccaagaaatcatattcttcataatttaaattgtatttatctgtcattttctttaactcttttacaaaatcatcctttttgtatgttactggaatccttacatctattcctgcaaattctttttcgttatcaatagttactctacctatatttactgttagtttacctgatacatcatccttgcaattaggaattatattgtttccattagcatcttcaccaataacttctgctaaaaacttaattatattagaatctatacctatattattaagagctatacaaagtctagccactgcatttataccagtatcacttgctgctgaatggacactttttccaattatacagattttattaccttcaacagtatactcaaaatttaatttatcaagttctttttttaatttatcagagtattttccaatatagattgctttacctggaactgcatttaaagcctttccaactgacaactctatatcacttttgctatcacaagtcaaatgaacttgtaaaagacctttctctgcatttgttattgggaatctagaatctggagtaaatccatagtttggtatttcttcattattttctttatatttatttatacatctccaaagattttcttcatcagccccaaaaatgaatcttatcctcttattaaagtctacatttaaatccataagagctttcactgcataaattgctgatattgtaggtcctttatcatcttgtgttcctcttccatacaatttaccatcttctaaaacagcttcaaatggagggtaattccagctttctaaatcaccttctggaaccacatcaacgtgaccaagtatacctatcattttttcaccttgtcctatttctgcatatccataatatccatctttgtatactgtcttaaatcctaaagatttacataagtctaatatacctcttaaagctttatctacattttcaccaaatgggcaattttcagttgcttcagatataacactaggtatttttacactttcttgtattgaagaaatcatttcatcttgtagagaatttactttttctttaatttgctctttcatattatcacccttcaattttcatcataatatactaataaatattttgacctttttaaaaaaaaatatgcttattttttcagtttttttataaattcaatcgcttttaaagtccccatttttgaatggtcaaatgtaagtccaccttgaaaataaacattataaggaggtcttattggagcatctgcacttaattctatagaagaaccttgtataaatgctcctgctgccattatgacttcactttcgtatccaggcatgtcccaaggaacaggttttacataagaatcgactggtgcagcttcttgtataccttcacaaaaacttattacttcatcagcattattaagtctaatacattgaataatatcacttcttaagtcatcatattttggtaatacatcatatcctaatttttcaaaagctcttgagcaaaagatagctcccattacagcctgagatactatataaggcgccaagaaaaaaccctgaagtacatttctagttgttccaaaagtaagaccacattcttttcctattccaggagaagtcattctataagatataagctcaatcaaatcttttctaccagctatatatccacctgtcaatgcaagcccaccaccaggattttttattaaagagccagccataacatctgctccaacatcagtaggctctttggtatctaaaaactcaccataacaattatcaaccattactatagcttctggtttaacagactttattacttctatagcttcttttatatcactaattgaaagtgattttctccaagaatatccttttgacctttgtatcataacgagtttagttctatcatttattttgtttttaattccttctaaatctaagtttccatcctctaaaaaatctacatcatcatatgtaacaccatactctttcaatgaacctttttcttctcttatgcctataactccctctaaagtatcatatggtctaccagtaacagataaaatttcatctcctggtctaactataccttgtatacataaagtaagtgcatgtgtaccatttacaattattggtcttacaagagcatcttctgtattaaatactttagaataaatttcctctattttttcacgaccaatatcattatatccatatcctgtagtccagttaaagtgcatatcacttagtttagattcttgcatagcttttaaaactttatattgattatattctcttatttcttttatttcttcaaacttatcttttatttcttccattatttcttgcgatagtttaaaagtatcatcatctattccatagtagtcttttaataattcttttgtctcattaagcattttatcacctgtctctttattattttatttaaacatgtaaaggagactattttactaaaacaaataaattatagtttataagttagtataagtctcctctcaatcatcttaaattaaattaattatctatctgttgttattattattgttgttttggttttgatttgttagattaatatactttccaggttgtatagttgatacagcatgtttataaatcatgttttgttgtctattatccccttctattaatattatataactatcaaacccctttacaagccctttaacttgcactccattaactaaatatatagtaacaggtatcctttctttccttgcattatttaaaaacaaatcttgtaaatttaaaactgtatttttcattagatttgtaccctcccaagattaaattgaacttctaaaatattcctaccttatattctatataagttatgacaaattttcaatattaagttgtatacttaaaaatttatatattattttatagaatctttaatatataagattatttcattttttaattcgtctatattttcatattggtctaaatcaaaccatcttgctgttttatatcttttaaaccatgttatctgacgttttgcataccttctagaatctcttttaattatttcaatagcttcttcgtatgtatattctccatccagatacttcaatatctctttataacctataccttgcattgatatcatatcttttttaaatcccatacttaaaagtttttttacctcttcaaccaatccatttttaatcataatatcaactctcatatttattctttgatacaaatgttctctatctctatttagaactattattattggttgatattcttcattaaattttaaatcacttgaaaaatcattcattttcttaccacttagacaaacttcaagagctcttatgacccttttagtattgtttttatggattctattagcagattcttcatcaagttcttttaacttattatgcatgtaatctattcccttttcagcaagctgtttttgaagttcttctcttaattcattattggcatcagattgtgcaaaatccatattatatattaaagagtttaaataaagtcctgtgcctccagttactaaaacacattttcccttttcatttatttcatgtatatatttttttgctctttgttgaaactctgaaactgaaaatggatagtcaggcttaacttcatctataaggtaatgcttcactccttgcatttcttcctctgtaacttttgcacttccaatatccatatattcatatatttgcatagaatcagctgaaattatctctgcatctatatcttttgctaattttattgacaaatctgtttttccaacagcagttggacctgtaagtattataagtggtatttttttcataacattcctttccatatattttaaatatccaaatattttacataattcttttaaacattttttctatttctgtcttagatatttcgaccattataggtcttccatgagggcatgtaaatggattctcacacttttctagctgttccaataaactttttatttcaatatcgtatattttatcatttgcttttatagcagacctacatgccatagatgcaaatctctctccttttaaatcataattacttgtaatttcttctatattatcaattatttgaagtataaatttctcagtttcaggtactccaaatatagtaggaacacatcttaccattatatgattattgccaaaaatttctagttcaaaaccaaatttcataaataactccaagttattttcaatttgaagcatatctacatttgatacttcaataaccactgggtctaaaagtatttgcatattgatatcttgtctatagaacttctccatatatctttcatatagtattctttcatgtgcagcatgttggtccaacaaatacatagaatcgtctttgctcaaaattatataagtattaaatacaactccaattacagaatatccatataaggaaaacttgcgttttgaactacacaagtattcttcttcactgtccttaatactatctcctaagtaataatttccttcatttttaattccatcaacttgaaactcttcttgtatattatcatttgcactatcttcacttagataattaatgttttttacatcatcttctacacttgcatttaggacttcacttactgattgaaattcatttattggtttttcacttgataaagtcacaacttcaatgacttcatccttatctttagtaatattactatttttaggagtagattctaataaatcattatttcttaatttataatctgtacttttttctctactgttaatagcgattctaggttgtgtttttttatcactataagtagcatattttccaataagatttgagtgtattaatttaacctttaaaaaatctctaagttctatatacacttcttgttctttttcaaatttaatttcaagtttattggggtgtatatttacatctatacatgatgggtctacttctatatttaagaagcacactgcatgtttacctattggaattatagacttataactttctgttattgcatctatgattattttactttttacaaatcttttatttatatagatatgttgtaagtttttatttgaacggtatatattgttattacctatatatccattcattttaaagtgattgcacttaaactctacatctattatattttccgttatttcttttccatatatacttctaatagtgtttacaagttttccatcccctggagtatttaacatctgtttattgttatttgtatatttaaattgaatgtttggattacctattgcaagtttatttatcaaatcacttatgtttatagtttctgcatgagtagattttaaaaatttctgtcttgctggtgtattaaagaaaatatcttttataatgatggtagttccattagtagaacctattggttcttttgatattatttttccgccttcaacatatattttagttcctattatttcatctttagttttagtcgtcatttctaattttgatacagctgaaatagatgccaatgcttctcctctaaaaccaagagagtataaatcatacaaatcatcaatttttttaattttactagtagcatgtctcaaaaatgatttttcaacttcacttgaaggtattcctattccattatctgtaatcttaattagactttttcctccatcaattatatctatggaaattttatttgcacctgcatcaatggagttttcaataagttcttttactacagaagaaggtctttctacaacttcacctgctgctatcttatttatagtcaaatcatctaggatgttaattatatttttcatttttacacctctaagattttatttcttttgcttttctttgaagattataaagagagtttatagcatctaatggagtcatatttaaaatatccagatttaaaatttcttctgatagtatatctctatttacactatcaaaagagatttgagttaaggctacttcttttacagaatcttcttgattaattttctctttatcatcattttgcttcattaaagcaacttcatcatttaatgctttaaatttagaatttaatttatcataatccttttttatatgtttgtagtcttttactataagttcatgttctatttttagagattcatatttattcttaaaattactttgatttaccttaactaattcttcgtccaaattactattaattatattattgttttctttatctccatttattgcaacactgttgtaaacatgatttttttccaagtctttaagtatatattttgctctttctatgacttcgtctggtaatttagctaatttagcaacatatattccataactcttgtctgctccctgaggaattatttttcttaaaaatattattccttccccatcttctttgactgctattgaataatttttaacctctttaaactcttcttctaaatcagtaagttcatgataatgtgttgcaaataatgtcttacatctaatatttttttgaatatattccactattgaccatgctaaacttatcccatcataggtactagttccacgacctatttcatctaatataactaaacttctctctgttgcattttttaatataagggatacttcattcatctctaccataaaagtagattgaccttgagataaatcgtcactagctccaactcttgtaaatattctatctaatattggaatatcagcagactctgctggtacaaatgagcctatatgtgccataagagctattatagcagtttgtctcatatatgttgatttacctgacatattaggaccagttattatgttaataatgttttctccacgatttaaataagtatcatttggaacgaaattctcctctcctactatattttcgacaacaggatgtctaccatttcttatatcaagtttattattttcatttattgctggttttacatagttatttatatgtgcaactgttgcaagggacacaaaaacatctatattagctatagtcttagccactttttgtattctatctatgtttttatatattgtatctcttatctctacaaatatctcgtattctaaagatttaatcttttcctctgcatgtagtatcttttcttctatttcctttaattctggagttatatatctttctgcattactaagtgtttgctttcttatatatgtctcatctagctttgcctgtttaaagttggcttttgttatttctatataatatccaaaaactttattaaatcctatttttaatgatttaactcctgttttttctctttccctgttttctatttcctttacaagaaaggctccattcttagaaatctctcttagttccttaagttcatcactaaaatctgatttaattatgtttccatcttttatggttatcgtaggttcttctagaatagcttcatctattaaattgtatatatcatctaatttatccatttctgaaacatactcttttaggatttttgcatttgataaatttatagtatcttttaaattaggtaacttttctatcgaattttttaagtgaattaactcttttggtgttactctctcaaatgctatctttccacatattctttctatatcgtatatatttttaagtatatcatttaggtcttctcttaatataaagtcatcttttatttcttctattacatctaatctattttcaattttagatttatttatcaaaggttcttctacatattttcttaaaagtctacctcccattgctgtagaagttttatcaagtacatgtaataatgaaccttttttcttattccctcttatagtttgagtaagttctaaattagttctagtaaacatatctaaaaccatatattctgatgaattgtatatatttatattattaatgttagatgttatttgtttttgagtattgtatatataattcagaagaattgataagcttgactttattagacctttatcatcaaactttagtttttgtagataaacatctggaaaatattcttttaatatatttatatccaaatagttatcactaaaactttcatttatgtatatattacttacagtagctatatctctaagcttttctataaagtctaaatcatttataattatttcagttggatggatttttgcaatttcttcaattaccttatcttcatttaaacatgttgcattagtttctcctgtacttatatcaacataagttagacctatattagtaccatccttatacaaagataataaataattattctttttattttcaagtaaatttccatctaaaactgtaccaggagtgatgactcttataacctctcttctaacaattccttttgctgtagatgggtcttccatttgttcacctattgctactttatatccattttcaactaattttgatatatatgaattggctgagtggaaaggaacaccacacataggagcacgttcttctaaaccacaagcttttcctgtcaatgctatttcaagagcttttgaagctactaatgcatcttcaaaaaacatttcataaaaatctccaagtctaaaaaacagtatacagtctttatatctattttttacttcaagatactgtttcatcataggagttaatttattcatatctatttgcattatcaaacctccttcttttctaattaaatattatatcatagtagatgattattattaacacaatatataaaattttgacatataactaaaaacaatccaaaatgtatactcacattttggattgctaagtttaatgcttattaaataaaaatatatatatttttacaataaagatattatttcttttttaagtttaatgatattttcaaggttatcttcatttaactttctactatctataacaaattctttctttactattgatggtttttttgaaataacataaattctgtttgatagcattatagcttcgtcaatatcatgagttataagaagtattgttgaatttacttttttcttaacatctaaaagccatttttgcatggatgttttagttaatgaatcaagtgccccaaaaggctcatctaaaagcattatgtcattagaatttataaaagttctcaagaagttagctctctgtctcattcctccagaaagttctgaaggatatttatcttcatatccgcttaatccaaacacctcaaaataaggttttaccattgacctagctttactctttttttctttttttaaaattagtggtagtgacacattatctattatagttttatatggcaagagtaaatctttttgatacatataactatatttaccatttatattcactttgccactatcataatctgtaagtttagttataatattaaaaatagtactttttccacatccacttggccctaatatagaaacaaactcaccttcataaacatcaatacttatatcttttaaaacttcaatatctttataagtttttgatacattttctatagatacttttacttttttattgtggtaaaaattcatttgtgtaagcatcacttgccttcatatccttatctattaatttatattcttttaagaatgatgtatagttgttccatacactatctttcatttctccccatcgtggtgcatcatctttgtacttgcttgctaaatattcttgactctttaaagctagtttttcatctacttcaggtgcatgttttactaaaatttttgctgattcttctggattttttattgcatattcataaccttttgttgtagcttttaagaattttttagcaagctctggattatctttaagcacagtttcattagaaattataagtggtgtataataatccaatctctcatctaaatcttttactggtataaagtttaagtcatatccaattaaatcagctttaactgcatcccaaccttcaaatatccatgcaaaatctacagttttcatagctgcaaagaaatcatcttgaccagtattaactatctttaacttattaaaatcagctccatttttcttcataactgctttaaaaacagcttcttctgatggagagccccaaccaccataagtttttccttcaaaatctttagctgttgttatattcttttcttttggtgatgcaaacccagaagtattatgttgtataacagttgctacagcttttattggaagtggatcttcactagtctttgcataagtaacttgttcttgatagcttataccaaagtcagcttttcctgttgctactaaagtttctgctccactttcaggtggttgtactatttcaacatccaaaccttcttctttatagtaacccttatcaagtgctacaaataatccagtatgatttgtatttggtgtccaatcaagcaccatagttacttttttagaagaagtatctttatcattgtttttgtctttattgttatttgaagaacatccagttattgttgccaatgtaaaaacacttactaaacctaatattcctaactttttaaaattcataattgcctccctcaaatacctttaatcaattaatctatgtcttataacaactttttttacagcctgtacaattcctacaaacattaaactaaatataactactaatatagtagatgcaaatactttatcaagtgcatatgcactttttgacctaagcatataaacaccaagtcctttcgttccacctagccattctgcaacagttgctgccattacagcatacgttgcagatattttaagtccagaaaaaaatttatccattgccataggaaatttaaggtgaatgaatgtattaactttatttgagtccatagtcttaaataaatttaaataatctttatcaatattctcaatgccatctacaaaacttattaatataggaaaaaaacaagtaagcattaccatcaatacttttggcattgttccaaatccaaaccatatcataaaaagtggtgctataattattgtaggtatcatctgtgtaaccaacataataggataaagacatttttttattattgatacaaaatccatcaatattccaattaccaatgatattataattgcgactataaaaccaagtattgcttctcctatagtaaccacagcatgcatggataaattttgataatctttaaaaaacacattaattatatctactggtgtgggtagtatatactgaggaacttctaaaactcctaccatagattgccaaagaataagtataaacaaaaatgttgctattggatatatactatctttgactttatctatgatttctaagtttttcatctatagtcagacctccagctttttcatctactctagctactgttatgactctttcacatccaagattaaaagggattttatgtaccttttttaataattcaaaaacttcatcaaaatcaccttcaacagtagtgctcattgctcctatttcacatttaagaccacttttttcaatttcagcaatacaagcatctactactttatacatttcttcttcacctttgtaaggtcttagtggcattactgctatgtctgcgattaccatttaaatcactcctttaaaaataattaatacctactaggtatattttgttttttattaaaaaattttattactaaaaagatattatatttaaataaaagaaaagtcttatccaaaataggataagacttatttttatcttaactggtctccctacactggcattatccaaacaggttcaaagggtcgagataaaatctcctctcagcacattagctccccgaaatatattatatcttttctacttgattatactacacttatcatattttaacaaattttttatttatattagatattttatccgttcaaaaatatctaatatacattgtacattattacaccaaataaattatcttaaaatggtaatttatcaacatcttccaaaactagattaactgaattttctagtttttattttgctatttcaagcatatttggatgtatatcaattccatacaaatattgttctaaatttctgttttcactaatctaatttgcaatcgttacagattacagattagaaatagcttttagactctacttatctttatctacaaaaaatccttcaataaattcagtaataatattcagtaatctaaaaataaacctctatctggatttttaagatacaagccttttaggaagtatcttttgtgataatataaaaattactcgtcattatcatcaaaatcctcagcaaccaacattttagataagaatcaaactctataatataattattttatccaatttatttttgagaaataaaatatttttttaatttttaaattttttaatatgcaccttgaaaaaagaaacgttttcctatattatggtaatagtagaataaaactaaataggcaaaactagagaaatttagtgacgcaaagctatagggactaagacttatgaaatgagttatgtcagccagttgccaaagagatattttctttttgtttttatgaatgttttttagggggatatatgatatatgtttatggataaaatggatagatgtacacatatactaactgcatatatatgcagttcacgcgattactgcaattttatagatacacaattaaatgattttatactagaatatggagagaatgtggtagaatcttgtttgcatcaagtgatggtattggtaagcagatataattaaagaaattttattttctagaaaaccctttttagttttatctacgttttataattcattaaagaactaatcaaaataagcttcattatatatttttcatgaagtaaacagttgagtttatctcatatactgtttaccccaattacataattctaataatatagattccaatgatttaccacgtttagtagacaaatattcaacttttggaggaatagtcggataagaaattctcttaataagtccatctctttcaagatactttaattcttgtgacagtatcttatgacttatatgaacaacatctttttttaattgactgtaacgtattggctcttgttttaaaatatgccataaaataattgccctccatttacttcctatcacagtcatggtaaaaccaattgaacaattaaaatctttttgtctttcttcaatatttggaaattcttcaaaattattatctatatccatctcaatcctctctttcaaaatagtaagtatctaactaaaaagtgcattcttgtttagcgtactaattcgtaatataatcttgattaaaaaatagctacgcacactcgtgactttagtcatgagttagtagctaaaatagtcaacatatagggaaacctatatgtagagataggatagaacctatccaatactacttgaattgctaaaaacccctaaagctaaccaaactaaaacataaggatgaaataaacctaagtgtgaaagttacgaaagtagaaaaaattggttagatggtataaggttaaaccctaagtactttaaaatgggtaatcagcaggtaaactccgaataggagaaacttcaacgactattcctcttgagggaagtacactacaagttatcggtagtggaagtgggtagaccttaacggataatgccgaaggataagatatagtctgtgcttatgtgaaagtgtaagaagttcataagagaactgcataggtagtagcgaacttatgtgaacgacagcctcaaaaatgataaaagttaagacttacggttcttatatatgttatttaaaattaaatataaaaccttctaaataattgttttaaataattacatttgttaatattatgataggtgattaataaattgttcaccacagtattatataatatattaaatattaaaatcattaaaaagtgtatcaaaaaacaattaaagtgaggtgatagcagtgaaaaaagcttataagtttagaatatatccaaataaaaaacaacaagagttaattaacaaaacttttggatgttgtagatttgtatataataaatatcttgctaaaagaatagatgtttataaaaacgataaagaaacttttacttataaacagtgtagttctgatttgaccaatttaaaaaaagaattaaattggcttaaagaacctgataaattttcactacaaaacgccttaaaagatttagaaaacgcatataataaattctttaaagaaaaagcaggatttcctaaatttaaatcaaagaaaactaatagattttcatataaaactaactttacaaatggaaatatcgtgtattgtggtcaacatataaaactacctaaacttggtatggttaagataagggataaacaagtacctaaagggagaatacttaatgctactatatctaaagaaccaagtggtagatattatgtatcattatgctgtactgatgtagatattgaagtatttgaaaatactaataatcagataggtttagatttaggaattaaagaattttgtatctcaagttgtggagactttatagaaaatcctaagtatcttaagaagtcattaaacaaacttgctaaattacaaagcgaattatcgagaaaaacaatcggtagtttaaatagaaacaaagcaagattaaaagttgcaagacttcaagaacatatagctaatcaaagaaaggattttctacaaaaactatctactaaattaataaaagagaatgatattatttgcatagaagatttacaagtaaagaatatgattaaaaatcataaactatctcgctcaatttcagatgtatcatggtcagaatttattcgtcaattagagtacaaggctaattggtatggtagaaaaattgtaaaggtaggtaaattctttgcaagttcacaaatatgcaataaatgtgggtataaaaacgaggaagtgaaggacttaagtataagagaatggatttgtcctagttgtaatgaaactcacgatagagatataaatgcaagtataaatatattaaaagaaggattaagactaataacaattcaaaataaataacgtatgtaagaaccgtaggaactacggggatagcctgtggagaattagtaagacatattttagtatgcaaaattctatgaagcaggaaccctgtgactttagtcatgggaggttcagtgtagcatagagccttacataatactacttttttagatgtatatttttaaattttaatatagacatatgttattttattaattttatttaaacagataataataaataataatttatctcaagttttctatgtagataaactaatctaatgtttagaaaggattatataatatgaataaaaaatttcgtctttatcaagttgactcatttacaaaagaaagattcacaggtaatccagctggtgtaattacaaatgctgatggcttatctgaatcacaaatgcaaaaaataacaagagaattaaataattcataaactgcttttattttcaataaattggctaaaaatcatcaagaaaattatgatgtacatatcagattttttacaccaactaatgaagttcctatatgtggtcatgctactattgctgcccattatgttagagcagtagaaaaccaattcaataacaaaacagtatttcaaaaaactggtgctggaatattaccagttgatattataaaaaaagataatgattatgaaataattatgacacaaggaaaaattgaagtatctccaccattacaacaaacctatcaaaaaagattacttaatgcatttggtattttaaatgaagatattcgtacagattgtcctattgccatatcatctacaggacattcaaaagttatgattggaataaaggaattatcaacattaaatagtttatctccaaatttatatgaattatcgaaaataagtcaagaaataaaatgtaatggatattatatttttacattacataataaagaaactctacaagttcatggaagaatgtttgctcctgcaattggtatttcagaagaccctgttacaggaaatgctaatggacctttaggtgcgtaccttgtacattataaagtaatacctatacccaacacagagtttatatttgaagcagttcaaggagaagcaataaaacgcaaaggcaagatgttagtaaaagtaattatttcagataataagccagttgaagtaaaaataattggaaaagctgtaattgcattctcaacaaacatagaaatcgaattatagattctttctaagtaaatttttgaactttttaatactaatttaataacaaactaatttatatacaatcaaattaatttttttattatttgttaatatatatttatcattatattatataataatatagatagttactatatcttataattagataaatcataattatatattattgttaaaactcaattatataatttttaataatattattttaggaggtaaaaatgataaacgatattaaaaataaattcaaaaattacaaaccatatataaatggatacaagaatatgaagagagcatctgttttaattccaataatagaaataaataacacacactatatattatttgaagttcgctcaaaaaatttgaagcatcaacctagcgaaatttcttttccaggtggtaaaatagaatcaggtgagactccatatgaagctgttattagagaaacttgtgaggaacttggaacttttagtgacaatatagaagtaatatcaagtcttgacctccttataacaccagtaaagtttatcatacatccatacttaggatatataaaaaatattaataatttaaatataaacaaggatgaagttgaccatacttttttggttcctataaaatatcttttagagaatcctccaaatacttatagtaatactgtaaaagtttttccagatgaaaatctaccatatggttcaattccaaaccaaaaagattataaatttgaaagtggaagttatcctattctgttttataaatataaagattatgtaatttggggaatgacagcaaaaatactagaaaactttttaaattttttatcagaataacactcataataaatcatcaaaacttttacataagaaatttataaaagtttctaaatttaacaattctaaaatatcaataactatattttgtagcacttttttattttattattgtttgaatatttgatggttttcaatgcaatttcaacataaatactatgtattagtgtatactgttgatgaattaaagtatgataatctatttaataaagtatgaagtaaatgattttaatgtgtctttatggtaaaattactaataagtaataaaattaattaaaatatatggaggtgcttataatgtttgctgtaggatttgttgttataattgcacttgcctttttcattttaagtgtactattatttaatggaaaagccagtatgctactagcaggttataactctatgagtaagaaagaaaaagcacgatacgataaaaaaaaattatgtagaagttctagcattgttacttttattgtctctataatgctatttattatggcatttttgggatatagaatagagagtggtcaaatggacgaaaaaaaaatggttcccttttctataatatttataatagtcatactttccagtgtattttttaatatcctctactctaacaaaaaatgtaaaaaataaatagttgtaagttgagcagttaattataaaagattgactgctttttcatgtatattgactactcttattaaatattttaacatttaaaaatctatgtaaaaataatgaatatagtacaaacttctaataatgattttacctttgtggttacagtccactatatataatttaatatgataacatggaattactaatgacaactaagtaagcttttataaaatataataaaacaaaaatagatgtacaatgaaattatatcttatatcaaatttatttttattaatagcaaaaacttacattagcataacatatgacaaattcgcttaaaataaaaatttttaatataatttgttctatagtacatctatttcgattagtttacataattttattattttgtacaatattaattatttactaatatcccatttaatgaaaaagttctaggttcagtaattttgaccataactaatttaccaattaaatcatcatttccaccttcgaaatttacgagtttattttgtctagttctaccagcaaacttattttcattatttttacttcttccttcaactagaacttcaactattctatctttatatccatcatttatttctgcagaaatcctatttacagcttctaacaccctattaaatctatcatgctttatatcttctggtatttgattttccattttagcagcaggagttccctgtcttttagaataaataaatgtaaaagctgaatcatatctaactttttcaaccacatctaaagtgtccaataaatcttcttctgtttctcctgggaaaccaatcattaagtctgtagaaaaagcaatacctggaacttcctttttagctttttctattatttctaaataatattcctttgtataatgtctattcatttttttcaaaaggctactgcttccacattgtattggtagatgtaaaaactcacacaccttatcacaatctctaattgcgtatattacttcatcagatatatcttttggatgagatgtcataaatcgaaccctttcaattccttctatatcattcacttttcttaaaagttctgagaatgaaactggattttcaagtgtcttaccataagaatctacattttgtccaagtaaagtgatttctttcgttccatttgcaacaagctcttttatctcgttaattatatcttcaggagttctacttctttctcttcctcttgtgtatgggactatacaatatgtgcagaaattattgcatccatacattatatttacaaatgcttttaattcaaattttctattacttctaagaccttctattacttctccatccacatcccatacatccactaacattttgtcagaatttattgattctgtaagtaattgcggaaatttatatagattatgtgttccaaatataaggtctacatgtttatatttttttcttaattcctctacaacatgtggttgttgcatcatacatccacatacagctattttcatatctggattttttccttttagatgttttaattgtcctaagttaccatacacttttagctctgcattttctctaactgcacaggtgttatatattattaaatcactttcttcaaccatcattgacatttggtatcccatctcttctaacatcgaacataatttttctgaatcatgttcattcatttgacacccaaaggtttgagtaaacacgagttttctctttccagttctgttgaagtattcttcattttgtctgtgtatttgttctatatatttatcttgttcttgtattttctctataggtattgttacttgttttcttttgctcacgtctattcctcctagttaatttcttatattacacataaccttaattatatcaaataagaaaaatcttttaaagatattattatttttctagttgtgttttaatagtaaatctaatgatttatatatactatatttctaaaatataaaatcatataattattataataataaaaagatgttttaaattaaaacttaaaacatctttccttaaataaaatatatgatttactattaaatacaattacatctattcattttcaattaaataacaatcatttaatattaaatattgaccttcctcaaccgttatatatcttcttcctgaaaaagtatcattagtaactattccctctgcattacctaagctatcatttctaacttcataatatgcatcagaagaatttgacattataatatattctccagcaggaatttctaatccaattttatacataccatttccaaacttaccattcttggccttctgggctttagcatactttgctaatgtcattgttgaatcctcaattttaatatattgaccattctttaaggtgatatatctagtcccactaaaaatatcatttgaaagtatactatcagcattacctgtactatcacttgtaacttcataataagaagcataacttcctgagtttgaagtaattaagtattcacctgctgatatatcttttccaaccttatacattccatcttttatagtctttgtagtaggtttaacattttttacaaccccagtattaatatctccaattccatttgttatatttaaacactgttgtactatatttgaatctatatatcctatagaagttatcttcttagcattttttaaaatgcttttattgctaccatcattaactaaaactattggaccatgttttgataaagaagatcctacaagtgcatttgttaattcataagctccagctatataaaactctctagcatccttataaaacttatttattattgctttattagtttcaaaacgagtactccctcctagtctagtagatttagtattgtttactaaagtggtactcattgaagctgttcctcctattacataagactttaaaccactagttgaaaaaggtatactttgtccattagtaagaattattggtgctttatctcttgctgctacagatgcaatacttatagcatctgcttctcctttatatgcattggttagcataacagtattgactttttttattgaatttatttcttttgcaacattataacttgtttttattctgtcatttcccttaattcttacaactttcattttcttagattttaatgaattttcgacagatgtactaatagaatatgttcctccaattatataaacttttgatacattttttaatcttgcagatgtctcagttggtatagtatttttttcagttaatagtataggggcatttaaagctcctgctagtccacttgcacttaatccatctgcaatagagttactagtattaattaatatagcagttttatatgcatttttatctgctattttgcctgctatttcatacttattttttccttgtattttttctacagatgatattgcatctactaattgaatatttgcaaatacaaaagaaatacttaaagtcaatgttaatattcttttatagaatttcataataaaattgtccccctcataataaatttttaatatataaatacatattcttaaattagttatgtacttaacaaacttatgtaaaattgcaaattatattaagcatattacaaataaatattaatacaattattcatttagctataattgtatttacatttatattaaaaatcaactagatttgtataaatacttataattatatttttattcttaatattttttttattatgttattttaatagatttatttttcttttttaagcatagagatgtatttttccatatattctatttctattatagtttcgcttatttaattcacccaaaatttcacttaatattagaattttaaatcttttactaaaacagacttttatagttctattaaaattttttactaaactttattttatactatgaattatctattttttttgctaaatttaagcaagttttccacaaaaaatatatacattactatatttttaaaactctataaatatataattgatttaattggaaattttagtgtattcaaaaaatgagaaatcagaggagattaatataaaaatttatcttgaaaagtcaattaaatatatcttatatttaataactacaaatgagatacatataagaatattatataggtatgataatttatctgttaaattaagtgtaattggtactatataaatattttattaaaaataaatatataataccaaatctttaaacaacataagaataaaatagttataatctactttattcttatgttatttagttattataatgctttataaagtaaaatattatttcgtagttaagcttgataactaactcttcttattgatagactaacaatcttgaataaaaatattcctgcaactagatttattaaaacagctggtaatactactgctaagaataaagctgtaaatgaagctcctggaagaccaactatagcttgagctgctaataaaaagatagttccacttacaagagttcctattggcattattattgcaactactacagtatcttgtgttttcttagctaatttttttataaaaggcatattataactaatattcattaataaaaatactatatttgctgtaagagttttatctattacattaggaatttgacctcccggaaaacttgatgtaagtgctgtaaatattcctgttactatacccgctatcaaacaagttttataatcatctctatttaaaaccaatattacaaataacattgctagtggtacatctggcttcattggtaatcctatagctggtgtgatttgatgtattaataatcccatcgctaaaagtattgcatttaaagttaatttttttgtatttgttttcattttttgtacttcctcctatttttttaattttcaatttatttttttgccaacctactatatcatcatctttagcttttgaaattcataacatctttctcaccaccttctatcttttaaattttcagtaaaataaaaaactccgtcctaaactaataggacggagattatccgcgttgccacctaaattatataaaaattaatataaaattcaattttcatacatctcattatcaggtacttacataccttattcgctataacgtgcgactgacgataaagtctactctcaaaactatgatttcaatttattcctctaagggccattcatcaaattttttcttgctaagattccaccatcctcagctctctatactgaacctaaatttaactactcttccttgtcataggatttaatttattgtattgaattttgttgttaaaataatgatattcttttttctaaaaaatgtcaatacctttttataaaaaatatattttgtaatctattttttataaaaaaagtaaattatactatacatttcttttcatatacaaaattctatgaataattactttaatggtctaatagtctgctctttggctctaattcttcttatattaattttgtgaataactgttgatgtaattttatattttgattcatgaggaattaaattcttcaaagttaattaagtacatttatcaataaatttacttaattaaccatcatttaatactcattcctgtatttatatgcctcctttgaaacagaatattactccattttaattacatcatattattaaatagataccaatgattagaaaaatgatattcttttaattatttttagtaaaattttttcttctttcttttaataaatattagcactactaaaactataaccaaaaatatgactattatggacaatactaattttgttaggatattatgtcttcttgcatttcgtcttttatatttatttatagtttgatatccatactttttagttcttatacttcgttttttcaactttactttacttttattatatttcctacttttatgtctacttttagatttaatagttttaaatttagtattatcatatgtataattctcttttattgaagaaatgtatacactagactcaataatagcttctgcttctacttgtaatggatttataatactgattataagtagaaaagatatagctatcccaatcaattttttcttcttattcatattttccccctcataaaaatttttaactagttcattataatatatatataactaaaaattacaaattttttcaagtttcttatatatcttattatctttaatattatttttattatcataacttttactttttttaaaatttttcaaagtagtattaatttatgatacttggtgtataaagtataagttaaatctactttcaattaaatttaccatttataattactttataataaaaataaattagttaatttattctctttagttctgttataatgtttctacaaaaaagaatcccattaatgggattcttttttgtgatttattaacatatttaaagctcactagtatcgtattataaacttaaatgctcttctatgtattgattatatacatatccagaatatcgtttttcatttttattgatattaactcttgcccattttccaacgctataacatacttcaactttaaaaccatcagggattgtagttataactttagattctaatgttctatcatttctaagttctaaacttaatccatttgttcttatatttcctatgtaattcttttttctattttttattgtatcattactattgtttttagcattacttaatctttctaaatatttataaagtaaccagcctttgtcataattactctcaacttctgcccatattccatctacacattttaacttaacaattttaccttctggtatactttttaatttcaaactatttatgtctggtttttctcttaaattcaatttaattttagttttaaaattgatgctagatttgccaaaattttttaacattaattcagatatcatcttaagccctcctcttgccaaatattaagttattaaaatatataactctaaaaatacttttaacaaaaagaattattatctttttggcaactggctgacatgacctttattacataaagattttagtccctatagttttgcgtcattagatttatctaatattgcctatatctgaataataacataatttgaacaattaaaaaataatattacctcaaattttatattatttaaatataaattaaatttttaattaataataatcaaaaaatatctttatatttattcaattactgttctttatagtcaatataaaagacagtaatttatctatagtgttacttatattttatatatatggctatttttcaacattttacaatatatataacatttatttttttaacttttgtcagtaaaatgtcagcaagacactttatccacaatttttatataagttttccacaacttatccccagtattatccacataaaaaaggtagctcttatattattagctaccttttatttattaatcttcatatttccagctttttatccaacttcctatttctattattttttcttcagttatttcttctccatcatgtaattttgaaattaattctgataaaggattgttatgtaaacctctaaaaactctttttccctctattttgagatattctctctcttttattaatactgtatagtgtacatgcctcccaattctctatgatattaaaaaaccttttttggttaatctagctaaaagtataattgtagttgtatgcttccaaccatatgttttttctatttcatctgcaacatcttttgatattacagttttataaccagtattccatatgcatttcataatttttaattctgtatctggtaattttttatttagcataatatattccttctttcaatttatgtcacttcttcaaatttatctagcttaaattataataggagttttttagaacaaaaactatagttaatttttaccaggtactctacgtgtttagtctgttttttaagtgtaaaataatgttcatatctataaatttatttaactttcaaacaatcctgttgaataataactaattctattgtattattttagttgtagaataaaactaaatcggcaaaactagagaaatttagtgacgcaaagctatagggactaagacttatataaatatcttatgagttatgtcagccagttgccaaagagatagtgttctttttgtttttatgaaagttttttagggggataataatttatatgtttggaaataaaatggataaatgtacacatgtattgactgcttatattagcggttcgtatgattattgtaattttttagatacacaattagatgattttatattagagtacggagaaagtgtagtagagtcttgtttgcaccaagtgatggtattggtaagtaagtataattagatagacattgatttctagagaaccctttttagttttatctacatttatattaatatatagcaatgtaaaacgcttaaatatatttttaatattaagaataactaaaatgttgactaaaaaatataattaagtagacatttctattaatctatgatacaatagtatttgtggtaatacacaattaaatcaagtatatcttgatataggttaataggagtatttttaatgaataatggaatagtgaaatggtttaataatgaaaaaggattcggttttatatcaatggaaggtagagatgatgtgtttgctcatttctcagctatacaaacttcaggatttaaatcattagaagaaggtcaacaagtaagctttgatatagttaaaggtgctagaggtcctcaagcagaaaatataactatattataatatatagatttttcgggaaagactctttttagagtctttttttattgttagtatatgtaagataatcattggtgaagtaaataaggtatattgagtaatgttcttgatagtttatatgctaatgaatttcaaaaaaataagcactcctataaaaagagtgctcttaatgtaaatataagccttcattggtccagcctaataccccgtattctccaagttctaactcttttttatatacattaccactttcagccatatctaacacaatcatttcttctttagaatcaatttgtaaaatatgaggactgtgtgttgtgacaattatttgtgtttttaggagaattgcttttaatgtaataaaaagtttacatacaacatagttaatataaaacaaaattatttttgagaatgagctaaataaaatcttaactttacataccacatagttgatataaaaccccaaaataaacttagcatctccaatgtttacacatatacaatgctcttaaaattgcagtgaacatgcaatagtgcaattgataatacttatcatatattctcaataccttatatttcaactgctaaacctcaatttgtcacaaatatcgctcactgcaaaatttctatatttttattatatcatagcatataattaatattttcaattaatttttacatttaattatgtttaaattctataataatgcaactttaatgtttctttctggaactaatataaaaactatttcagaaagattaggtcatgcagatataaaaataactatgaatagctactctcagtttttagaagagatggacagagaagcatttgaaaatttgagcaaaatactatttattgtattttaaagaagatgacttattcaatatttgatgctagaatataattaataaaaatttaattataggtgattgtattatgaacattattaaaagcataactttactcttaacattattaattgtgatattaatgacaggatgttccccaagagaaagtgctagtgaagttgcaaaaaaatatattgataagatgaactctggtgactatgaaacagcatatagtttattaagtaaagatagtaaaaaaaaaattagtatagaaaatcttgaagaatttcaaaatattttagttagtacaaaaagaataattagttataaaataggtaaagaaaaaatcataaaaaaatataaacatgatggaaaagaatataaaaatgttgttaaattagaagaaacttttaatataaaaaaccttctttataaaaaagatgattctctaaaagtaaatagatattttgtagttgaaaataacaaatacaagctattattgtatgaaagtttcaaaaaagaatttggtattaatagtatggaccttgctcaacttaagcttaatgattttggactaaaatactttaaagaagttgaccttatactaaaaaaagctattgctattaatcctactgattcaaagctttattatgcccaagcatgtaattatatgaattttgatggatttcctggttattcagatacaacatataatgctttagattcaattaataattctttaaagtatttagataaaaatgattctgactacaaaaaaaatgcaagtaatatatataacttaaaaggagttattcttatgtttcacaaaagatttgatgaagcacaacaatatttaaataaagccttatactttaacaaagataatgaagacccaaaatataatctaaatacaataaaaaaacatctaaactagatatttaatttttgaatttataaaatatttttttatgtataattcagcactgaatcataatctctactaaactaattacaagtttaaattataaagacttatttctatataaatattactctataacaataagtttcttatttaaattttaaaatattatctaaaaatcataaaaaagaaggtataaagagctaccctcaagctcaatataccttataaatatctaaacttcattttttactaatttttctatatctttgataatatgttctttagatttttttccagctatggcatcaaaaattgcaacagcctttttctctccaaacttttctgctacatcattaaagtctaaaaatctaacactttcttttggtttaccaaacatataacacctctcatacatttttatatatttattataacttctatagacttatttttcaccaataaacgttagacaaattagtccctttatttttttaaactagctttaccttcaaaattcttaacaaaaacagtttattctactctataaataaaaatagacaatttaatttgtaggaaactgataatagaatacagtaaataaaactttgtttaatctatctgaaaaagttatctattaaaactgctatgaatttataaagaatattctagttcataaaaatacaaatatgtaaatataatcaccttaatattcaatttatttaaaataaaaaatgtataaaagatttaataatgacaatatactattctcaatacaatctatgatgtaaataatttaaaactactatattatttaaaaatttatatttatatatgcaattctaaaaacttaataagaagtgaacttagaaaataaagcttaatttcaaagacttaaatagaatattattattagtctaaataaactacgtgtatcaaaattatatattaaattcttctaaaatttttattgcaaatcttgcgtttggatatgtaatagacccgccaccaattacacctatttttatagcttctataatttcatctttacttgctccagaattaatacaaccctcaatatgataacaaatacactcatcacatcggcttaaaattgaaatagctagtcccattaattccttattttttttacttatagccccttctgaataagtcttatcatcaagacttccaaatactctaaaaaactcatctgtttcacttaattttttattgtaaaatcccctatattctttcatttctctagtattcatcttctacctcctatgtttttcttataagagtatcacactgtacttatattttcaatattaaatacaaattttcattttatgttcattagcctaatttatattattttttgaaatctcaataagttatcatataagtaagattttttcagaactaaaatagaaatcttagtaatttctttattatctatctcagttctgaaatatattattcttatccaaacattattatagtgattaattatattagttatttttacctgaaattttatacatcaaataagaatatataaatggtagtattacaattacaaagattacaaagatattataaaaaggaatattaataaatgcattaataattaataatattccaccaataagccaaatccatccagctaaatggtgtgtcttattccaattatcttcatcatcaagagtccatggcaaaattattcctactgagtaattttgtttacatttaggaagatagtttccaaataaaataactattattcctaaaattaatcctgtataaaaattagactccaaactaactcctgttgaatataaaaccatcagtatttgtagaattactgaaagtatagcaactccccattttgataaattttgtataacatttgaaaaattagcttttttaggctcattctcaagtctaaaccatgtatacaaatggatacatagcattaacaatggtacaccaaaagctgctataacctttggagcataattatctggatttccataattatcaaaatgaattgcaacttcatttggtaatctattataaaaatatattgatacaataaatggtataaaacatattaaagtagataaaataaattgtttatttatcgcttttttcattatctttttctcccttctccataaattgtgaaaaccaaagcataacctcttcgaaaactgaaatatttatttcgtagaaaataaagttcttatactttgtttcaaatatgagtcctgccttttttagttgagatagatgataagaaattgtagcattcgtcatattaaatttttcactaatttctcctgctgacattttattctccctcaacataaccaatatttctcttcttatagggtctgaaagagctttgaatgtttctggaaaccccaacaccatcacctcgctatttagaatttcatctaaatagaatataacataacatccattttatttcaataactatttagaaaaatttctaaatagttatttccaaatatttattgaaaattttcatattaagattctcaatttacttaagtcgcttttatataatcttattttatctaatttttttaatttaacaaaagtgtattgcaccacaattgttaaagcaaaaacctaatgactgatatacttatatatattacatatacttttaatttcaaattaaaagtagctaaatccaatttaaaaagtagttaagtcctatttaaatagaaaagaatgaaataagaaatatactgtataaaaatgcataaaaacctctactaattagatacaactataatagaatatatttattattataataacaaaagaattaaaaaaattaatttagcataaccttgttaaatatagatttgaatatgaatttaaagttatgtaaaattaaaaatacaggaatgaaaattccattcctgtataaaatctaacttttgagtctcaatacaatcttattttgagacaatcttttttgttttatattttcttatatttaaaatataacgcatatcttatgcaacatattcatatttttctttatattctttcatcgcatcattccaagcgtcttgtactgttacacctcttttattagcaattttttgtgccagttcaattatcttcatagctcttcttgatatgttcataaacattcctcctacaaattaccatatatttcatatatataaatcaaggttatatttttatgatatataatccttctattgtaatattacaatttatatgtgtattatatatgaactatattagaagataattagaatttttataaagctatatgattagattaaatataaaagctttacaattacttataaatttaaaaagtctataaactaaactaatgtttgatataccaattttacgaccataaataatgccattactaaaaatattggttttatcatctttgaacctttctttatagcaactttagcacctacataagctcccattatcatcactaatgcaaacactatagcaattttataatctacttgaccatttatcatgaataataacaatgaagttatattacttgttaagtttaatatttttgtatttgcagaagcatgtaaaaaatcatatccatatatttttataaatccaaaagtcaaaaaagttcctgtacctggaccaaaaaaaccatcataaaaacccattataagagccataagcatccctagtcttaaatttttcttattaacagcttcaaaattatcttcttgacctaaatttttagaaataaaggtgtaaatagccactattaaaatcataaccacaaccaaaacatttaatatctcttcacttattgataatacacatctcacacctagaacactaccaataatagtaaatggtactaatttttttaaaagatcgttattaatttttccagactttgcatatctataggcactacttatacatcctgctgatgctgcaaatttatttgtaccaatggcaagatgtactggcactccaattgccataagaacaggcatgcttataagtccctcctcctcctgctatagaatctacaaaagcagctaaaaacccccctatacataaaaaaataactgaaaacataaaattcctccatcattctctttcaatttttcttacaatatatattatataatcttatttaatacttattatccagcatattctttctatattcatttggagttatactattaaacttcttaaatatttgtgaaaaataactactgttattaaaacctactttcttacaaatatcactaatactcatgcttctatctaacagatattttttagattcttctatcctaagaagatttatatactcagttattgaaactttatttctttcattaaaaatagaactcaaataatttggacttataaaaaaaacatctgatatactattcaaatttatattttctttataatatttttttatatattcgtttatattttcaattagatttcctttatcttttctccaaaatgctctattcttatcaatacactctttggaaaattcaaataatacattccataaatcttcatcactgtctacaagtgatatttttttattatatttatttcttaaataagatataagttttaaatcctctaaatctctaagcactgttctagacaatacaaatatcatttcctgaatagtatctctaacatcattatatcttaatttgtttgtatctattagattataaacaccttctaaattcatatttttaatttctttttcaatataaagttctaattcaaagggatattcttttgaagaattattgaacatatctatcggattaataatatactcttcttctaataatctactatttgcttttttaagtgcctcttcaagtcttatattttcttttctactctttaatatctcctcatcttttatactaagttgattttcaaaaaaattcctcttagctatttcctgaataaattcagacatcattaataaattttcttttaatacatataatctacttttaggatttaatggaaattcattgtaaattttgtttatgtattttatatcaataccagaactacttgataattcagataaatttttatctatatcaatagacttatatactataaaattaccacattctatatatccaactatattttcttctaatactataggtatctctaaactggaaacaccatactcacaatggtacactttttcaaagttatcattatttatgcttttaacaagttttttagtacacggttttatatttttacaaatatcgcaaaatttattttctttcttagtctcaaatattcctttatactttaagtcatatacagatattctaagcttcaatatattagatatttgatttgcaagattttcaattatgtttacattaactaactcttgtatattgttttcagaaaatactataggtatttgtctcaaactcgaaaatttatgaggaacataagtaattaatattactaaatcaattttaccagtgtttataatttcatgttctgaatatggtgggcaataaactatagatgtttcctttatattgacctttttaccatcaatcatttgtattccttctccctgaatcacatataaaagctgttcttcacttaaatgaaaatgcttttcttggcagtttcccggaaaaaatcttacaattccagcactaagtctattgaattgtgtttttgatggttcgtgtatccacataacctctccccaatcaaatttttgtacttcattatttgactcaataaaatccaccataaactcacctcgtagtttttatctaaatatttttttattcctttaaatatctccttataatatacattatcataattttcttttttattgtatagataaatagttatatagaacattgtccaattcttcctaaaaatatagtgtaaaaaatctttcctcaaatgtttccaattgaatttactctttatattagaaaaatcaaaaaattatttctttattctataaggattattttttacacatctttttttcttttaagtaatatattttctcatctattttatccatacaactttctagttcatgtattttatttttaatgttttgcttatgttgttgaaataattggattcttttatctattgtaccatctcccatatcacaaaaatgaaagcattcatggatatctttaatagataaaccagtattttttaattctttgataaatattagacgctctacatcttcttcagagaaatagcgaacaccacttggttttctattgataggaagtaataaacctttttcttcataaaatcgaatagcagatgaagaaatttttgttatttttgatacatcagttatagaatatttcataatctctacctccctaaattttatatgaataagaatattataaaaataccttatacagtagtcaacaaaaaagtattgacttcaagttaggttgaagttgtactctttgaagtgtaaaagaaaacttacaaaagaaaggatgatataaatggaaaaatatgcaactatgattaaagaaaagctaaatgaaggaaaggtcttatgtggagtagctgtttcactgtctgattcagttgtaagtgagttaatcggtatatctggatatgattttatttggattgaaggagaacatagtgctttagaccgtaaagacattcagcaacatatgatagctgcccatgctggtggtgctgcttctttggtacgattagtaaacagtgaccctgaccttgttaagcccataatggatatgggaacagatattatttgtttcccatttattaatacagtagaagatgcacaaaaagccgtagcagcttgtacttatcctccaaacggtataagaggatataatcctcaaagagcctcttattatgggaatatgaattattttgactatgtcaaaaacgcaaacaatgaaacattaaaaatgatgttaattgaacagaaagcaggttatgataatcttgaagaaatagtaaaagtcgagggtattgatattatagcattaggccctggtgacttatctttagacatgggtttttccggatatatgaatagaattgaaataaaagatatgatttctcatgctgctgaaatatgcaaaaaatataagatgccctttattatttttcctacaatagaaaagaaaagtattgaagaatgggttaatattggagcaaatatgctttgttttgcacaagatactacctttatcacttatgttatcaatcaattattatctttttataatgagattgtaccaattcaaaaacaacattaaattataaatctaattttatattaaaagagactaatattttatctatctctattaaggatattttcttatgtatcataatattagtctctcttattattatatactgctatcatcattagttgctatttatactatttttataatatacaaatttattcagctaacgttttgcctaattctatacactcatcttttgcttcttcatttgggtcttccattgctgtaattccttctccaccaataattgtagcaccagcattttgcatacgttcttcccagtctctcatccattcacaatttccccatccatatgaaccaaataatccaatctgtttacctgataccatagattctaattctgaaacaaatggctccatatacccctcttctagttgctctgctcccatagatgggcaacctaatgcaaatttatcttcttcttttaaatcacttggtttcagtaagctcacatctaaaacttctggtgtcttaccttttaacttcacaccttcagccacaaaatttgccattttttcagtatttcctgttccactccaataaacaatatatattttactcatttttacctcctgtagtattttttaattaatcaatagttagttatagctaactaacatctaaaaaacaaaagatttctttatctgaaatctctttatttttctaaatatagaatatcacaattgattttgaaattcaatatttattgataatatttatcatttatattttatattcattttataatatcaaaacactgtatcgtatttctaatctttcatagaaaaatttctaacttatagtacttttgcatctcttataaatcttttatatgtataagtacatagaaaaacacaccttttccagatgtgctatctataatatcgtatatttatttttcaattctaactagctaatatgtttataaattttatcacttaatacctttatacattgatgtaaaatcttacacctaagtaatttttattatttgtctcgactctatataatatagctattttatcatcaaatcaaaaattatcttttgctattattcttgtatttataaagatttaaatataagtatccatttccttgttccgttctaggtattccaagcgctctcgtacattttattaattgtgcatacagttcagcttcatctaaatctctttcaaactcctctcttgcccattctttaattagtgctaatgagcctgatacgtatggtgcactcatactagtaccactcataatagcaagtttattatccatataagtcgatataatatttcttcctggagccaccaaatctattgtagtatttgaattactaaacttttcaaccaaatagttttcatttattgcacctacttctattacctcagcataactggctggataactatactcacttgtactagaatcaccatctccattattacctgctgcacacactacagaaatattattttttactgcttgcatgacagcattttttaaattcttatcatctttgtttcccccaagagacatagatataatatcaaccttgttatttacagcaaagttaatagcattaattatactttgatatgttccggtaccatctttatttaatgcttttgctattaataatttacaatctggagctactcccataacttcattattatagttagatgcagctataatacccgccacatgagttccatggccattaaaatcctcatatatatttttatttccattactgtcatcactaaaatttgcaccaccaattatttttccttttaaaagaggatgagatatatcacaacctgtatctattataccaactacaatatttttaccagtataaccttcatcccacattcccctagcattcatttgttttattccatatgggaatttattttttgcacctcttagattttcatttatttcatacggaattagtttcattcttttattcatcatatatcctcctaaaaattttattgcttataaaaatcatgaattttattttataataggtttataaatcaaattaaaacctatatctacttatttatatttatgatatattttttatttttaggagtcatatttttttgtatataaaataatatttagataactatattaaaaaatacatgtttgcttatatacaaaacttactaaaatatctttaatatttttgtatacaaacagtatatttttcatacaaaataaaaaggatacctcattagtgctataacacctaagatatccaattaatattttcttaattttttctaattttcgtaaatatagttcactattttaaaactgctcctgtatttgctgatgttaccaatttagcatatctacttaagtatccatgctttattttcggttctaaaggtttaaattttaattttctattttctatttcaacttcatctacttttaactctaattttttgtctggtatgtttatagaaattatatctccttcttcaactagtccgattaaaccaccttccatagcttctggagaaatatggcctatagatgctcctctagttgctcctgaaaaacgaccatcagtaagaagtgctacatgcttatcaagtcccattcctgcaactgctgatgtaggagatagcatttctttcattcctggaccaccctttggaccttcatatcttataactataacatcacctttgtttatttttttaccaaaaatagcatttacagcttcttcttctgaattaaaaactcttgctggtccttcatgaactaacatttcttctgcaactgctgacttttttacaacagctccatttagagcaagatttcctttcaatattgcaagcccaccttggttactatatggattctttaatgtatgtattacttcttcattttctatttcacaatttcttatattttcccctatagtcttgcctgttacggttttgcaatctaaatttattccatttatctttgaaagttcgttcattatagctggtattcctcctgccatatgtaaatcttcaatatgatgttttccacttggacttaattttgttaaacaaggagttttttcacttatttcatcaaaaaaatctaagttaaactctattcctgattcataagctattgcaggtaagtgaagtactgtatttgtagaaccagccattgccatatcaacagctatagcatttttaaaagcatctattgttaaaatatctctaggttttatgtcgttcttaagtaactccataacatacatacctgcatattttgctattctttttctttctccagaatgtgacgcagcagtaccattatatggtatacccatgcctaaagcttctgttaaacaattcatgctatttgctgtgaaaagtccagagcatgaaccacatccaggacaagagttcatggctaactcttctaattcttcttcacttactgttccatctttacatgctccaacaccctccattgcagagttaaaatcatatacttttccattttttttacctggaagcataggccctccactcacaacaatacttggtatattaagtcttgcagcagccattaacatacctggcactatcttgtcacaattaggtataagtaccaaagcatcaaaaccatgtgccatagccatagcttctattgaatctgctattaattctcttgaagccagggaataattcattccgacatgccccatagctataccatcacatacccctatagcaggaaattctaatggcaaaccaccactcattcttactccattttttgcagcttctgctatttcatcaagatgcagatgaccaggaatcacctcattttgtgcatttactatacctattaatggtctttcaatttcttctttagtaagacccattccatacattaacgctctctttggagctccttctattcctttttttatatcacttctcataatattacctctttcttacttttttaaattttcataatattattataatatatttttctattaattaattacgaaaattgtaaaaaaatattagcatatactaatgaaaatttattacgattttttatcaatatcttacacaatcgtattatataatattatcttttcaatatattttataaactaatatattttacaaattgttgagtaatattttatgatataaatcagaagaagcacttctataatagaaagtgctcaactatgaataagattaataatatatttgccttagatatatagacttttataaatattaaagattaatcaaatctgatgtttgaaactttatcccaattaatcttccttgaatagtcttctggatgtgataatctaactatatgagttgaattatcatagctgtaataaattgtagtagtaccatcaactggattctttttgtatccttgatatacagcactatttggtactttcttttcaacaaagctatatgcagatgaagtatcaatagtttctattttattaggaaatataaacatataaaaagctactactataaaaatacatatgcatgtaatactataccatttaatccatttcataaaattcctcctactttaccaaaatatactattattatttccatatatttataatatttatacatacgataaaatttttatatacctaactatataattgtagaaactttgattatatatattttttaatcttaataatatatttttataaattaataaatttttaagattttattaaaagatttttaaaacttacagtttaatataaagatagtacttataaaactaaaaacataaatttgaaaggggacaaaataaaatgatatggacattttattcatttatttgcgttatattaccatgcttaatataccaaatagtcgttataaaacgaaaaaatttgaaagttgaaaagaatgtaatgatacatttagtatgggtatatatttttttattatatatctatctagcacttagtaaagctggaattggtagcatatgggatataggaaggtatagtgggctttttagaattgatgaaataaatctaataccttttgactcagttggcatcttaacatatattttaaatataattatgtttatgcctttaggatttttactacctttaatttggaaaaattttagaaatattatcaatgtttcattaactggattaggtttttcattagcaattgaactttgtcaattgtttaacttaagagctacagatattgatgatttaatgatgaacacattaggtgctgttttaggatattttatatgggtaggtgtaaataatttatttaatcttataaagaaaaaagatattttcccatctatatataaaaatattattcaagatgaaattgctattacaattgatgatgacataagcaaaaaaattacctctctttacaaaaatgaagctattatatatttaatacttgctgttttaggagaatttttattgtttaattggtccattataccttattaaataatttattgataaaacaagtgtacttcgatatttacaaatatgtaaagccctctttcatactacaaaagaaagtgggctttagttattaaactaaaatgcacactcactatttagctggcatctgaaatattttattaacattgtatctgactttatttgatgttatataatcatattttgttccattttcaatgaagttttgtatattgtccaacacttgtatagctcttgtattattttcataatctcctatttttacagtatcaattttactttcaaatactgcataaacttgactaccatctattttaatttggtttatctgcattaaattagttttatcttgacttctaattattatcatatcaattcctccatttacttaattcattttaatttctaagaaataatattttataattgatttatagattatttaaatttttaaacttagtattttattttttaatacgattatttatataaattacatctctaataaaaaattctcttaaagaatacttttttgataatactttgttttatttgtagattgcatttttgaccattataactaaattaaataatctaatgtattaaagcataaaattatctatgctactgatttattttatacatttggtaattttacttgcaaaaaattttgtacatattgtttatatctcaattaagggttttcaaaactttctatatatttattaattaattcagtttcttatttcaacataccacctctcatcaaattaccatttgtataattcatattatacatatacaaatggtaattttcaatatattttattattttaaccctttttttttatatttttggtaattttattttactttttatcaaaataacttataatttcggtaaggagtgatgtacatatggaaagtttaggagatagaatagcaaatctacgaaaagaattagatataaatcaaaaagaacttgctactaaagtcggtataactgaggctagcttgtcacgttatgaaaataatttaagagaacctaaaagtgaaataatagttagattagcaaaagcattagaaacatcaacagattatttattaggcgtaaatgataatacaaaaataagcaaagaagataaattaatcatagagaacttatcagtaagtgaaaaaacaaaaaagctcttagaaaaaatatattctcttgaaaaagaagatagagaagctatagaaaaaatgattgataatgcctatttaaaaagattccttaaagaagagaattaattctcttctttttctttatacaaaatctcaagtaataattcataaaaagtaatatcttcactcaataaatgttctaatttcattcctatatcttcaattttttctttttttgtaacagtagtgtttgacttttccacatataccatcccccaacaaacttacgttcttaatgctagtcagaaattcccaacaaatttttaataaagtttatgtaattgtattttgattttataaaatatattttgattatccaaaatttccctagataattatcttaattatataataatacttttattctacagttgcaataaaaaactcgtaataataacaaaaaaatctattattgtagaatcttgtatgttttttctatttttatatatttttcaggatgatttttattataaaattttttataaatatataatttttttatatttatttgactttcttttaattctttaggatggatttaaattttctataaaaatcatactattttagctgtttacttgcttatttgatagttttatttctttgattaaatatctttcagaatctaagccagatgtctcaaaaaaactgatttataatataatcattttttctgctattcttatttttccaattttagtttcatattaaaatatacttttcatagacactacattctttcatactcattttcacatttaactatacaagtagtcttactcatttatgtactatactttattaatatttattaagaaaaactcaaagatttaaaaatatatattttctataaagtatatttatgaattatttcatatcttcttttaaaataacattactaacttctctatgttcatttctatacttagttggagatatattataattccttttaaataagcgactaaaataatttatgctatcaaagccacatctcatagcaatttctgtcatatttaaatctgtttcctttaaataatatatagctttatcaagcctgattccatttataaaatcgattgtagtcttacctgttatttgcttaaatgttctacaaaagtgatgtgcactcaagttcacacgactagcaagttcttttaatgtaattttatccatatatttttcttctatcaagtcaaagatacattcaaatttttctaaagaatactttctttttataaattcatcttcagaatatattttatcaatatgacttcttaataagagtactattaattgatagatattagcttttatagataactcatatccaacttctttattgtgatattcatcaagtatagttgtaatacattttaaaatcagaaaatcattttgaattaaattattaaatacaatatgatttaaagccaatggtgctaagtacttagtttgtaacaaatcaacttgattactaaaaaggaatgtgggctcaatacgaatactatagaattttaaattatctgataagctttctaaataatgtaattcattactgtttgctattacaatatttccaggcactaccttaaaattatccaatccacattcaagatatgctataccatcaataaaataatatatttgtagatgctcatgccaatgtcttttaaagtttgctccttttttaatgtcatcctttaaaaaaatatctataaagttttcttgacctttcctattaaaatatgtatttttatccttcattattcccccctcatcaaaatagtgctaattataagcaatatagttattgtattcattatttcatatcgctattatataaaatgtaactatcattgtaaacattaacataatgccagtcattataataaggaggtaataaaaatgacaaactcttttaaaaaagatgataatagaaaaaaaatcacagttttatttgtagtcattgccatgacttttatggcaacattagattcgagtattataaatgttgctctcccagttcttgcaagcaaactaaatgtatctctagcatctattgaatgggtaatagcaagttactcaattattatttgttcaacactattattttttggaagacttggagatattattggtaaatcaagagtattccaagtaggtactattctctttacatcagcttcattactatgtggattaagtaattctttaactttacttatagtttgccgctttattcaaggaataggcgcttctgcctacatggcaaacaatcatggaattatcacagaactatttccaaaagaaagcagaggaaaagccctagggattctagttactgcagttgctattggaaatatggttggaccatctgtgggaggatttattttgtcaatatttgattggaatgttatattttttataaatattccaatcggtcttattgtaatctttttaaatacaaaatttcttcctaatagtaaaaaatcttcagaaaatatggataaaactggtgctatacttcaatttttaggaacaacattattttttagtgctctaattagtgctcaacaaacaggattactaaatccatatatattaattgcactattattatcaattatttttattatattatttttgatattagaaaaaaaacatcctcaaccgcttcttgatcttgaaatttttagaaattttaaattttcattgaatttaatttgtgctcttacatcattcatttgtattgcatcatcaagtattttaattccattttacttacaaagtactatgaaacttccccctattcaagcaggtttatttatgatactatcacctttgattttagccattttttcacctatatttgggaatatatcagataaaatcaagtcagaaaaaattattttaattggtcttctcgttatgagttttggattctttctaatgtcaagattgaaagaaagttctgcccttattttatttgtaatttatatatcgataatatcaataggacaagctatatttcaacctgctaacaatgctttgataatgtcaagctgttctagaagtaagctaggagttgtaggaagcataaattcccttgtaagaaatttaggacaagttataggtattactatttctacaacacttttatataattttatgagtattaaagctggatatagggtcaatgattatgtgattaataatgataaaatatttgtatttggaatgagaaatgtttatattattgttacacttgtttgcttaataggtgcaatattaattggcttttatttatttaaatataataaaaatgaacagtagttttttataattatattcaaattatgattatattataagaaacttactaaaatacttcctttgagttaaatttaatttggacatattgacttaaaaatgttttattaatttgataaaatatttcttttcctatagtttataaataaaaatcagctgagcaaaatatttagtatattatgctcaactgattcttttattatttaactaaaacttcaatattttcatcttttccatctataactatagtacatccattatacacatctccagcaataagtttctttgcaattatagtttctaatgtatttcctatatatctcttaagaggtcttgctccatatacagggtcatatccttctctcaccataacatcttttgctgaatttgtaacttcaatagtaatatctttttcttttaatctattttttaaatctttcataaatatatctataattttcttgatattttcttggtctaaaggcttaaacattataatatcatctactctgtttaaaaactcaggtttaaatctatgcttcatttcattcattactaaattgttagtagtctctgttatatttcctcctgcttctaatagataattacttcctatattagaagtcattattataagagtatttttaaagtctactgtcttacctttattatcagtaagtctaccatcatctaatatctgtaagaacatgttaaatacatcctcatgtgctttttctatctcatcaaatagtattacagaataaggagcacgtctaactgcttctgtaagttgaccaccctcttcatatcccacgtaccctggaggaggtccaactagtcttgatacagcatgtttttccatgtattcagacatatctattcttattatattatcgtcactatcgaataaatttctagcaagagtttttgcaagttcagttttaccaacacctgtagggcctaagaaaataaatgaaccaattggttttctttcatcttttaatcctgctcttgcacgtattactgcatttgaaactgctgtaactgcttcatcttgtccaataactcttttatgaagttcatcttctagtttaagtaatttttctctttctccttcaactagtttagttactggtatacctgtccactttgatacaatgctagatatttcttcttcagtaacttcttcttttaaaagagaattttcagaaccatcattcatattttcttcgtactgctttatttgttcttctaacttaggtatttcaccatatttaacctctgctgctttgttgaaatcatattctctttcatacttttcagctttacctttagcttcgtctaattgagcctttaagtttttaatatctaatatttgactcttttctttttcatattttgctgtcatttcatcatttttagattttaactctgctatttctttttgaatatcatccaatcttgatttgcttttatcatcattttctttaagtaatgcttctctttcagtttctaatgtaaataactttcttctaacaacatctaattctgttggcaatgaatctatttcactacgaatcatagctccagcttcatcaattaaatcaattgctttatctggtaaaaatctatcttgtatatatctatgagaaagttttgctgctgctacaatagcattatcatgtattcttactccatgatgtatctcaaatctttcttttaaacctctaagtatagatattgtgtcttcaacagtaggttcttctgcaattacaggctgaaaacgtctttcaagagccttatctttttctatatactttctatattcatcaaaagtagttgcaccaatacagttcaattcacctcttgcaagcataggtttaataagattacctgcatccattgaaccttctgttttaccagctccaacgatagtatgaatctcatctataaacagtataatctttccatcagaactttgaacttcttttaaaactgcctttaatctttcttcaaattcacctctatattttgcaccagcaattaaagctcccatatcaagtgagaatacaatcttatcttttaaaccttctgggacatctcctcttactattctctctgctaacccttctacaattgcagttttacctacacctggctcaccaatcaatacaggattattttttgttcttcttgataaaattcttataatccttcttatttcttcatctctcccaattacagggtctaatttatttttcttggctaaatctactaagtttgttccatatctagcaagtgcatcatatgtgccttctgggtcttgtgtttctactctttgactacctctcacttgtgataaaatatttaaaaagtcattcttatttatattatattgttttaatattttaccaacagctgattttgattctgtttccatcattgcaagcataacatgctctacacttatatatgaatctttaaattctttagaaatactctctgcctttataagcacctcatttatttttctagtagctgatactccttgtgagtcagcaccttctccatatacttttggaagcttatcaatttcaaagtttacagtatttctcaaagaatcaattgatatattcattttttcgattatatttggtatcaatccatcctcttgattaataagtgctgagaaaagatgaattacatctacttgttggttatgattttttactgcttcgttataagcctcatttaaacttttttgaactcttaaagtcattttttctacgtccatataaatccctccattttaatattatatccaaataaattaaattctctcatttataattattgattttctaagctctaaaagactatcaagtaaattctcgtttttttgtatatcgaaactcaatgttaaattaaatgttccatctgaattaaaaaaatcgaatacttcttttgattttgctattaaatacaagtcttcatctataagtcttttttcacctattaataaatactgacatttatctataaaactctttttaaaatcaatagtgtatagattttctaaaatattatattgataaatagcaatattattaaacacttttaatatgtttgaatttacaaaattgtaaatttgattattgttatacagtgatatttgttcgtatatatattccctaaataaaggatgaatgttttgcttaagttttaaagtaacttcagctggtatttcaaaataaagcttccagtacttagagttatttttttctaaaataaaagctactttgttcaaactggtagaactaatctcctttagtgtacaattaaaattatagtgtctcaaactagttttttcattctcaaatacatagtcaaaccactgtagaacatttctatcaagttttaaactcatataaaaaccttcttccttatttactaaccttattaggtctttttatctgattatattctgctaataaactttctttatcagctctactacctttatatgctatatgtggatttatcatatactcaccatttttcactctttgtaaaaaatccatttttttcaactccgtaaacaatgaagataaagaagtttttggatattcaaattcacaagataattcatataatgtttttctaatcttattatttttatccatagagtttattaattttaatggaattaaatccctcttagtatacattccttctactactttaatataattcttaaaacaaatattcatatacttacttttattcataactaaacttttgctctctgtatattcctgatttaaatccttttttaatgtcttatccaaattaaatatctcttctcactctccttatctctaattgataatataaatatattacaaaaaaatatgtatgtcaaaactgaaaatgcaaaaagtttaccttataagtaaacttttgtttagctataagctaaactttattatttttttaatttagtatttccaatttattggcaggatttttgaataatatttataaattttttaaaaaaatttaaatctatttaatatggcagcctttcataaaatacattacatttattaaatgtataatattggtaattagttttttctaaaatcagttgacatattatatatatatttatataatgtgtatatactatatatacaatttaaggaggtgacttattgaatatagttattagtaattcgagtgggaagccaatatatgaacagattactacacaaattaaaagtatgattataagcggagagttaccagaaggctcagctcttccaagtatgagactattggcaaaggaacttagaataagtgtaattactacaaaacgagcatatagcgatttagaacgagacggatttattgagacagttactggtaaaggcagttttgtatctagtaaaaacatggattttgtcaaagaagaacaatttcgtttaattgaagaatacctacaaaaagcagttgatacagcaaaaagtagtgatattacatatgacgaattaaaagatattttatttttattatataaaggagaatgataagtatggatgcaataactataaaaaatttaaataaaacttataaagattttagcctacaagatatatctttttcagtaccaaaagggagtgtaatgggatttgtaggtgaaaatggtgcaggaaaaacaactacattaaaagcaattttaaatttaatatcttatgatagtggaaatatagaaatatttggtcttgatagtaaaaaaaatgaaaaagaaattaaagagcaaattggggttgtatttgagggaagcaactttcatgaaaatttaaacactgaccatgtttcaaaaatcatgagtaaaatctataaaaattggaatgacacattatttaaagactacttaaaaaaattgagagtaccagacaataaattaattaaggagttttcaaaggggaataagatgaaacttagtattgctgtagccttatctcataaaccaaaattattaatactagatgaggcaactagttcacttgaccctatcgttcgtgaagaaatactagatatatttttagattttatacaagatgaagaacactctattatcttatcttcacatattacaagtgatttagataagatagcagactatattacatttatacataaaggaaaaattgtatttagtgaaaataaggatgaattaattgatactatgggagttttaaaatgtaaacctagtgattttgataacctttcaagagaggattattcatattatcgtaaaagccaatttggatatgaagtacttcttaaagataaacatagatttatatcaagaaatccaaattgtattgttgataatacgtctatagaagaaattatgttattttatgtgagaggtgataaataatgaaaggtttaattttaaaagatttacttaatttgaaaggaaatgtaaagtttatacttttattcatcattatgtttgggtttatgtcttctttaggagatggaaatgttaataactttataggtgttattatagttttatgtactacaatgattgtttcaacattttcatatgatgatttaaataaatgggatagttatgtacttacaatgcctattaatcgcaatgatattgtattaagtaaatatttaactatgttaatatttagctttataggtgttcttgtttcacttattgttagtgtaactattggttattttaaaaatacacttatattaaatgaaacactacttattaatgcactaatcttatcaatttcagtatgttttggtagccttattctaccacttatttataaatttggtacagaaagagctcgtttattaatgattttatgctttttagttccaacactagctttattagtttttaaaagtattttagaaaatattagttcacctatttctatagaaattatacttaatacactagtatattctcttccatttgttgctattttactatttgtgatttcatattttatatcatcaaaaatctatagtaaaaaagaagtataaaatatactatacatgtctctgtatttaagtattttaaataaaatactatcaagtttattttggtagtattttatttttttattattaatatctactaggtatttattgttttattacttatatttaataagactatttactactttctaatcttatttatataatttattcattttataaattgaactactaatgatattattgaacatagcaatagaataacatctaaaatagtttttatgtattaaattaacttattttaatattcaacaatttaggtttactaaatttattgatgatttctttttatataacttaaactacatttttattttaaaaaatttaatatcaacaatataaaattaagaataagtattattagtttgacattagcataaatgcctattagaataatgttaaactatattctttctactgattttattaaaaaataccaatatacaaaagattatacaaggagaaagttcaaatatggaattagaaattacagaaaaaatagaaaaacaagatgaagatactatttttcaaggattattaaaatataatcttgctagacttgaagataaaaacccagtggatttaggaatatatattcgagataaagcaggtaaaattgttgcaggttttataggtgttactcatggtaattggctttctataaaatacttatgggttagtgagaagcttagatataaaggtactggaagtcaacttttatataagactgaaaaaattgctaaagaacgaggttgtaaatatgtttttttagatacattcagttttcaagcacctaaattttatgagaaatttggataccataaagtattttcacttgaaaattatcctctaactggaaagagatattattatagaaaaatactataataataaaaatcatattttatatttttaacttaaaacttctgctcttcgtctacagactttatgtttttatatcattattaatactaaaatagtattttactatacatacaaaattatttgaaagttcaaaaattataagtataaaagctaatcttagcttaaataaaaattatatttttaggaggtaaatatgttaggaaaaaaatgtatggattatctacaaacattaggaaaaataagttcaacaacaaatggtcttacaagacttatcttgactcaagaacataaaaaatctattgatttaattagttcatggatggaaggtttaaatcttgatattgaaattgatgacattggaaacgttataggtacatataaatcaagctttccaaatgctcccacattagtagttgcatctcatcaagatagtgtaaagtgtggaggtatatttgatggtatgttaggtataatagtgcctctagttggtcttgaagaagcaaaacacaataataggtcttatcctttcaatattaagctaattgctttcgctgaagaggaaggaactagatttgaaacttctttaatgggaagtaaagtttttgctggtacttttaaagaggaacttcttaaatctgttgatgaaaatggaattacacttgaagaagctgtaacaaagtttggatttaatacaaaaaacttaacaaatttgcatcctagaaaagatgtagatgcatatttagaatttcatatcgagcagggtcctgttttagaaaatgaatctcttcctgctggaattgtatcaagtattacaggatttaaaagttttaagatatcagtaaatggtaagtctggacatgctggtacacttccaatgaatatgagacttgatgctggatgttgtgcctgtgaatgtgtattagctatcgaaaaagtagctaaaacgactgctgatttggttgctactgtaggaaagatgaatttctatccatcttcatcaaatgtggtacctgaaagagctgaatttacactcgatgtacgctcttgttcacaagaaattcttgataattctgtagaaaagatatttaatgaaatatcacatatatgtgaaaatagaaaacttaattatacaagtgaacttgcttttgaaaatgttcctgtaccatgttctaataaaataacaaaaatcatagaaaaaagttttatagatttaaatcttaatcctttttatatttatagtggtgctggccatgatgctcaggaaatggataatataactgatattggtatggtatttataagatgtgctgggggcgtaagtcataatcctaatgaaagtgtttctgtagatgacttggatactgctgtaaaaatatttttaaaaatactagataatcttgatttaaaataatttttatataagaaagtatattaaaatatataatctaaaaaatcactttatatttatattatacaagtgtacaatataatctattataaaatataattttatgcttttatagatttttattttatacataaatatatttatatataaaggagataatttttatgaatgaaaaattaattggtattttggctggaatgggtccaaggtcaacagccccttttgttgatttaattattgatgagtgtcaatctcaatatggagcaaaatatgatgatgaatttccaaagatgatgatatattcattacctaccccattttatattgaccgtccaataaatcatgaacttatgaaagaaactataattgatggattacaaaagcttgaatcaactggtgtaaattttattgcaatgccatgcaattcagcacatatatactttaaagaattaaaagagtctattaatataccaatattaaatattgtagaagaaacagttaaaaaattacctactatctcacaaaaagtaactcttttttcgactagttcaacttttgagtctacaatttaccagaatggtataatacataatggacatgaatttatatttaaagatgaatggcaaataaaattaaacaatcttattcaaaatataaaaatggataaagaaaatccacacaatattgatatttggaataaacttatcgaagatgttaaaaatgaatctatagaaaatatagtaattgcttgtactgatttaaatgtagttttagaaaaatcatatccttcaataaatattgttgattcatcaaaatgcttggctgaatcagttgtcaataaatatctaaaattagttaaataaatttttcatgcactatattataaaaaatatatgttataagtttattttaaatagtatagacttataacatatatcatagtttcttgacaatatagaaattaaccatgtatttcattatattaataaaaaggataccaaaaatggtatccttcataaatatttatatgtttatttataaaaataatcatatatttattactttactacacctaaacaatattattcaagtgtattcatagagttagaaaattcttgtcctgctgtaacaagattagataacaatacatcagctactgcatcatttactgaacttattatccatttattatcctttttagaacattcaaactctacagtttttgtaacataagtctctttaacgcttttttgtttttctttcataattgatactaacatttcagttgttttctcatcagttaagtcttgtcctgaaaaactcataccaatcatctttgtaaatgcctcagctactatttcttgaagtaatggtgttgaatctataaatttacattctactttgattgtagccttatcacctttaacctcgctgtcttttattgtatacgtgattttagatgcattctgttttagataatctaaaacatattgggcatttgggtcttttgtatctaattcctttaatatatccttatatttttcgtcattattttccattaccttattcatgccttcaaagtcaaactttttcgcactgttaaaaaaactatcaattgtatcttctggttttgcacttgaacatgctgttaaagatattgctaataaaaaagttgttaaagctaatatgatttttttcatatctcaaatcctccctcttaatttgttgatacataagttattttaacatataatgagagtttttgaataatatatttaaaatattttataaattttcattaaagtaaagtctatattaaaacatatctatattaaattattgttcatatttacatcagtcatagtagaaaccataacagcttttattgtatgcattctattttcagcttcttcaaatacctttgaatattttgaattaaatacctcgtttgtaacctctaattctgataatccgaacttttcataaatcttctgagcaaccttagtttctaaatcatgaaatgctggaagacagtgtaaaaatataacattttcattttcagttttctttatcatatccatatttacttgataatctttaagttgatttattcttgcttcatattgctcctcttctcccatagaaacccatacatctgtatatataacatctgcacctttaacatcatcaatattttcagtcaacattatatctcctttggatttcttggctatttccttcatttccttaaccaattcttcatttggccaaagttccttaggtgctagtgctacgaaatgtattcccattttagcacatcctatcatcagtgagtttcccatattatttctagcatcaccaacatatacaaatttaactttattcaaatctttatctacattttcaattactgttaaaaaatctgccagtatttgtgttggatgatattcatctgtaagtccattccaaacaggtacaccagaatattttgctagactttcaactgtttcttgtttaaagcctctaaattctattccatcatagaatcttcctagaacttttgctgtatctgatacagactcttttttacccatatgacaatcatttggacctagataagttacatatgctccttcatcatgagctgctacttcaaatgaacatctagttcttgttgatgttttctcaaataataaagctatattttttccttgtagcaaatcgccttttatgccaacttttttcttagtttttaaataacttgataaagttaataaatatctaatctcttcttttgtaaaatcctttaatgtcaaaaaactcttaccttttaaacttatattattcatattaattcgccccttcttataaacttcttaaattcaattaaacttgttagcactttacttttttatttacttctaatttttatctttaattaactattttttgaatatttagttaatctctagtaatatatcttttaggatttcaagagcctcatctatttccttataactgattgttaatggtggtaaaaatctcaatacattttttccagcagtcaaaataagcaatcctttttttctagctttctcttctataatactagattcaatattagtttcaattcctatcattagaccaataccttttgtctttaatacaactttattattaaaactttcaatagattttcttatataatttcctttttctaatacttcattataaaaaccatctttagatatctcatctaatacaactgaagctgccaccatagctaataaattacctccaaaagttgtaccttggtctccttttcctagtacttttgaaagttttttatttaccaatactcctcctactggtattcctgctcccaacccttttgctacggtaactatatctggttttacatcaaaatattcatagccaaaaagtttaccagttcttcctataccgcattggacttcatcaaaaatcactacaatatccttttcttgacatatttttactatttccaaaacataatctttttcaagaacattaactccaccttcgccttgaatcgcttcaagaattattgcacaaactgtggaatcaagattattttttaaatcttcaatattatttctttctatatatttaaaaccttcgggaagaggataaaaatacttatggtatttgtccataccagttgccattaaagacatcattgttctaccatgaaaagagtcttttaaacttatgatagttcctctaccattaccatatttgtcactactatactttcttgctattttgaatgctgtttcatttgcttctgttccagaattacaaaaatatactttagccattccacttgaattaattattttctctcctgaatacaacactggctcattaaaatataaatttgaagtatgtaataatttatctacttgctcttttagagcattctttaaattactattactatacccaagagaagatactccatatccacttgtaaaatctatgtatttattgccattagtatcaaaaaaacaacttccttcaccataatctatgacaaaattgggttggttatatgtatctataaaatattcattccattttgaaattgtattgttgttattcattcttattctcccctcttaaacttataattttattcattttcttttcttattaatgtacctattccactatcagtaaatagctctgttattatagaatgtggaactcttccatccaaaatatgtaccctatttactccgttatttaaggcatctacgcatccctctattttaggtatcatacctccagtaattataccttcttcaaataatttatcaacatcctctaatataacttctgttattaatgatttttcttcatctggctctcttaacaaaccagggacatctgtaagaagtatcaatttatctgcatttaactctttagctatagcagaagctgctgtgtcaccatttatattataagtctctccatcatctccaacacctatagttgcaattactgaaatataacctgactttagacaagattctataagctcaacatttacttttttgatttctcctacaaatccaagttcataatttttatatgggtcacataaaatcatattattatccattccacaaagccctactgcttttccaccttttgtatgtattttatttactaggtctttattaacctttccagcaagtaccatttttacaatttccatggtctcttcatctgtatatctaagaccatttacaaatttactttctatatccacttttgctagcatcttattgatttctgcccctccaccatgtactaaaactatattgattccaacataactcattaatacaaggtcttccataacagattcttttagaccatcttttttcattgcacttccaccatacttaactacaatagtctttccctgatgtttttctatatatggtaaagcttctataagtgtatttgctttttctatattaatcattaaagtatatcctcctaatttctataacttccatttattcttacataatcatagcttaaatcacatccccatgcatttcctctggcattgcccatatttaaatctactaatatacttatttcgtcatcttcaaggattttttttgctttttcctcattaaaatctaatccatttccatttttacatacttcaatatatcctttcatactctcaaaaataatatcaactttttccatatctatttcttcacctgcataacctaaagcacacagtattctaccccaatttgcgtcagctccaaatacagctgtctttactaatgaagaagatataactgtttttgctaattttactgcatgttcttcacttaatgctccatttatataacattcaattagttttgtacatccttctccatcttttgcaacaagtttagcaagttctatacagacatatgtaagtgcactcaaaaatacttgataatgttcatcttttttgtttattctatcattttttgcttttccatttgctagaatcatcaccatatcattagtacttgtatctccatctacactaactctattaaaacttttatcaacagcaattttcaaagcttcttttagcaaaactccatcaatatttgcatctgtagttataaatcctaacgttgttgccatattaggatgtatcatgccagaaccttttgccatacctccaatagttatttttttatctccatacattattgctactgctatttctttttttataatatcagttgtcataatagcttctcttgctccaatatgaccttgtttacttagattattcactaattcatccatattttcttctattaaatttatatttaatggctttcctatgacacctgtagatgcaaccaaaacatcattttctttaatatttaatttatcactagtgaatttagccattttataagcatttataagtccttcttttccattaaaggtattagcattagcactatttactatgatagcttgtgcttttccatttttaatgtgttcctgtgtaacataaacaggattgccctttactttattttgagttactactgctgctgcatcacataaaacatctgaataaaccaaagctaaatctcttttttctttattttttctcaagccacagtgaatccctgaagcaaaaaatccttctgaaactgtaactccaccctttataatctccatatttatcctcctaattatatgagtttagtattttttcattactaaaatgatggtgcaatattttttaaacctgtattttcttcaataccaaatattatattcatgttttgtatagcttgacctgctgctcccttaatcatattatctatagctgaacagattatcaatgtatctccattttcatgtaatgatatgacacatttatttgagaacctaacattctttaaagaagctaccttatctaatgggagaacttctataaattctttaaattcataataatcagttaattttctatgtatatcatttatagaaatattatcttcttttgtacaatatatagttgataagattcccctatttactggtattaagtttggtgtaaaaactacacttactttttctttgcaggattcacttaaattttgttctatttctggagtatgtctgtgtttccctattttatatgcagtgatattttcattaacctccgtaaagtgactactaatcgataattctctaccagcacctgtaagacctgatttagaatcaattattatattattattttttatcaatttagaacttagtaatggcatcaatggtaaagaaatactagttggataacatccaggatttgcaattatatctgcatcttttatatcttctttgtatatttcacttaatccatatacagcttttttatgtaagattttatctataaaagatactccataccatttactatatacttcttcatcttttattctaaagtcagcacctaaatctataactttctttttcgatttaattgcttttattacaaacttttcactaactccatgtggaagggctgtaaacacaacatcacacatatctataactttttcattttctatacatatcatgttatttttatatcctatacttggatatatatcaactatattttttccaacatacgaatttgaacctattgctgtcacttcgactttatcatgattcattaataatctaatcaactctgccccgacatatccagttgcgccaataataccaacttttattttattcattttgttccctccatttttatattcaaatagtattaaaattctatctttccactttactatatgataatcatttgataatatgtagattaaaatattctaattaaaacaaaaaaccccttagcattataaatactaagaggcgattttccgcggtaccactctcattggtaaaattacaataatcattaaaactcaaattaaaaagtatctacaaaatgtacatttaaaattaaaaaagcctcttggtcaaagaccaagagacgaatatacacccgcgttaccactctaattgataagataatcttacccactctaatctcttaaggcgagattcaccaattaccatactattacttctggtaatctcctccaaagctctattcacaataaaattcgttactaggcttccaccattcccagctctctatcaactagctttatgctactctctttttcacaggatttcaatttattttcttattgttttatatgatagtttatttttttaactttgtcaatataatttttaaatttttggaaatattttctatatggttaatttccagcattttgtatctaaattgagttataatctttatattatcattcatcaacttaagaaatttccaaaatatattggattataaaataatgtaatctcaaaatacaatatttacatctatttttagttaaatttttttaatgttggtatctaaaaatttctcaatctttttctcagaaagtatctcgttggttacaaattcaccattaaaaaaaagactgtatgtagtaaatggtgcaggagcattttgtgcttcttttgctgtttcgaattttataagatttacatcaatacctctagaatttgcaatttttttcaaaataggagcatatttttctgtatgtggacactgattactgtaatataaaactataccgttctcatttaattttcttttttttacacaattcttaaaacatggaataggagcattatcagtaaagggaaaatataatagctcataatttggttctgatgtatctgctaaacaaaagcccttatattttagatatttagcatcagataaaaaaggcatttttttactagacgaaagcacaactaatccatatttaccttttgattttgcatcatcaacacactcttgtagcaatagattagaatatccttgacccttaaattttccagatatccaaaaacagttaataaatatataattgtccgcagtaataggacaccatgcattttctgctggaatatattctataaaagctttacctcttacatcaaatcgtttaaaggctagacctttatcaaaattatttttcatccaagcttttttagaaaaaacacaattttctccttttttttcagaaattgaacagcatatatgtctactgtcaatattatttatatttatatctataatctgcatacttatctccttttctaattacataataatttttaaatatattctatatatttttatcttaatattttgaatacaacaacatcatgtcatatatatttttattttacataatattatttttagattatttgaattatcaaattgcatatataattaaatacattctaggtctaaccacactatatataaactatatattatcataatattctaaatttataaaacaaattgtattgaattaaatttatttaagatatataattataattataattaaaataataataaaggtgttgtttataatgttcaaagaatacttaataagagaattaaaagaagatgatattaaaaatgcattagacttaatctggaatgtatttgaagaatttgaatctccagattattgtgatgaaggaattacgacatttcatcaatttatagaatataattctattattgaaaaaatcaaagaaaaaacactcttcttttggggttgttttgactctaaaaaacttattggagtcttagctattagaaatttaaatcatatatgtatgttatttgtagataaaaactatcataaacatggtgttgcaaaaaaattaatgactacaggcatacaatactgtatttgtaataaatttaatttaactgaaataactgtaaattcatcaccttatgctgttgaagtttatcataaattaggatttgaagatattgctgttgagcaaattgttgacggtatacgttttacacctatgaaattgttaatataataaattaaataaaaagcaaagtctcttaaatattttatagttactttgcttttaaaccaagatttaaaataatactatcttttttgttttttaataatatactttaaaagccttactaatatgaactataatttattttttgatatcctttttgattaacatataaattaattcaattattaaacataaactatgttgtttctctttatatctcttctttgtaaacaatattgggcatttgaaaataaatattcttaaaatatactgttctcctgttgattttcctttggtacaaatgataaaattttaatttacatgctccgtaatgaagtgtttaataaataagttaaaataatttatttacctccttaatcatattttttatgaatacctaataacacagtatcaatagaatcggctaaaccttttatagcttcttctttactcaaaagtgatttcccaagttgcaaagtcgaataaccatgaagtacactcattattaagtttaatacttcacctgtattctttgtatttagattacaagaaagaataagtttttctaataaggatttatattcatcaaagatttctaatgtttcattatttccatgccaagtagcccactgaattgtttcataaacaccaggattagaaattataaaattaaagtatgctatacttatacactttatagctgtatctccaaaatttccaatagtcgcctttatcatttgactattcatctctctcattcctttatgagctacttcaagtaataaatcatctagactttctatatgattgtacaaagatggtgtacgtattcctagcttttctgcaataacttttaaagaaactttgttaagcccatctttattaactatatctgatgtagcttgtataactatttctctactaacacgcatgattttccctctttcatttaaaattaattactttattagtttagctaatctaattagtttcgtcaattattgtaatttataaaattctttatactcttataaaatcttgacagtttaattataatttaatataatactaattgaattagttttaatactaatataattagtattatattaaattatatattacaacattattttatagtttgattaattcaacaatcactaatatatcaaactgaaaggagatttttatggaaaaaaaatatttcgaaattcatggagttccttcaatcctttggggaaatccttcaagtaaattatatatttacatacatggacaatgcggcaataaagaggaggctgaagcttttgctaatattgcagttccacatgagtatcaagttttaagtgttgatttgcctgaacatggagaacgtaaaagagaaaaaaattcatttaacccatggcatgttgttccagaattagtatctattatggaatatgcaaagtgccactggaatcaaatttcgttatatgcaaatagcattggagcatggtttagtatgttaagctttgaaaaagagaacttaagagagtgtatttttgtatctccaattctagatatgcaacagctcatttcaaatatgatgctttgggcaaatgtatcagaagaacagcttaaacatgaactaattatcccaacttcatttgggcatactctttcatgggaatatctacaatatgtaaaacaacatcctatcactcaatggaatgtaccaacaaaaatattatatggtaaacatgatgaacttactgaaatcggtgttgtagagaaatttgtagaaaagtttaattgcaaccttactattctggaaaatggcaaacattggtttaacacaccacaagaattaaattcattatatgaatggttaaatactttagttaaataaaaaataattatattattaatatgattaaattatttataaatgttatttaattaattttattttagcattattaaaataactacataaagaataaattagttattattaaagaaattaaaagtatatagagtattaataattttttaataattagttattatagaaaaaagagggatataatattgtctccctctctttcttctgtaatattatataatttttatttatcactctcaataaattatagttatctacaaaattcaatctttaatacattattaatatattgtgatattaatattacagtattaaataaaatctaataaaattaactataaaatatctattatataaatatccactcttatgtttgaaatctgtcatatagttttatccttcttatcttttatatcaataactttttttaataaaattgacaaaacaaagtaaaaaaccttattgataatgaaacaaatgatactataagttctgatattatagtaattgcatataaatagacatcataacaataatataatattgtcactataaaattaaatgtaaaaatctccaatctaactaaatacacatataggtattttttaagtttttaggtatttcttctgaaaatgatttattgattgataccaatttacataatctttttaatataaacaatgatacaatatatgggacagcacatatgtatatagctacttatattacatattacagttggcatattcgtatttgtaatgcttataccaattttaaaatacaccatcagtactaatggcattaaaataatctataataaagttaaaattattccaattagtacaatattatttaatattttacaactcatattcttttttatataaatttaccaccttatacattcttatttttagtgtatattataatggttttatatattatatcaacaatttattattgaaattcaataaattatatattataatcaataatatactttatataaaggagatgatattttatgattacaaaattttttagtaatatattatcagtatttctatattttctattatcacttttaggagttgctggtataatattcttatgtatgatacctatgtttttatatgattttagttctgacaaagtaatcgctttaattgcaagaatactatatttttctgactactttatagtcatcttattcttgatatttataattaatagtactaagtattccccattcatacttgaaaatgtaaaaaggtttaaagtaatgggatgttgtttattgataaacactataattgaatgtgtaattggttataactcaaatactagtcttataatgatatttggagataatagtggcggtatctcaccacttatggttatttcttttatatttgcactaatgtgctttgtaattgcagaaacatttgataaagctataaaaataaaagaagataatgatttaacgatatagaggtgatgttatggcaatagtagttaacctagatgtaatgatggcaaaaaggaaaatatcacttaaagatttggcagaaaaaatagatattacaaatgcaaatttatcaattttaaaaactggaaaagcaaaagctattagatttaccactctaaacgaaatttgcaaagctttagactgtcagccaggtgatatacttgaatatgtagaagatgaaaatgattaaaaaagagtgtttagaaacactcttttttattatactatatgatttttattcttttactatattattgacattaatattaactttgtttaaagtcataacaaaatacgttctaagaaagaaactgttcctttttctatttgttatccattacctataagaactgtatcacactaaatcatacttttaaattgataattttgccacagattcctatatacattcttttctacctaatatttatttaaactgttagcaaaacatggaactttttcatttacttatacctccatttatattattgcatagtttatagctacgtgttataaattacattattgatgatttatctaacatttgtaatcttttagatactctttgaagttacaacactgttatactctaattaagtaaactaaatctgatacaagttggtgattatatgaaaagaaaactttcaacctattttaaaggatatattttaggtttatgtatagcatttttattatttacttttatattaaaaaaattaattatagaaaatatcattggaataataattggaactggaattgcatttttactgatttacctatttaataaaaaaagaaaataatattctataaaaaggtcttttagtgaatttacaaaaaattaataagaataatatatacttagtatttaaaaagggtaacaactctctctagctgttaccttatatatttatctatatctttagtattaagttttttaatttctacttttttaattatcaatttctgtatgtagatatactaaaccttccaacttgagatttaaataacttttcaatctcataaactattctatacaccttattttcgtactctaaatcataatacacatttatttcacctatactgtttacacttatcgtataatgttctttttctattatacatattcttccaaaatctgacaggtcattatctatcaattttaactgtttttttatttttgaaaaatctaatcttggaaatatgtcattaggataaaaacttttattatatacaagcatttcatccaccccttatttattctatttatatcattttataccctaattaataatttattaatcatctttttccatattattcaaattctcttatataaaaacaaaatcaatttagaatatgtattattaaatataaagtgactcaatctttatttaataagaaaaaacatttatattacatataattaatataaaactaatgaagtgggtgtatgaaagagaaaacacaattttaatttacattccatatagttaatataaaacagttgtttttattttttctaaagagaaaaaactagactttacattccatatagttaatataaaactttctgtatattttagttgtgttttaatattataacactttacattccatatagttaatataaaacatggcagtaactaagaagaaaactataccttttttattctttacattccatatagttaatataaaacgaggaaattttatactaatgactgatgctagatttaactttacattccatatagttaatataaaactattataaggagcattatacgaccaaaagccaaagcagctttacattccatatagttaatataaaacaagcaacagcaagagtcgcgacaacattaaaaacttcctttacattccatatagttaatataaaacctttatttttttctctatatcgagttcgccaaattcactctttacattccatatagttaatataaaacagtccagcgttgtgtggtcgtaacacaccaatcctactttacattccatatagttaatataaaaccccaaaataaattaagtatttccaatacttatacatatacaattctcctaaacttgcagtgagcgagcaatagtgcaattgataacagttatcatacactctcaacgctttatatttcaactattaaaccctactttatcacaaaaatcgctcactgcaaaacttttatatttttattatatcataaaactcatactataaaataaaaatgggataattttacaaactaaaagcatctacattcttataagtatttattatattctctattccaatgattcctttttctttttattgcatccttcctatgtaatcgcactttagctcaacaagtcttttattttcattaacaattttttaaactattcaaaatcatcaaatttttcatcttatacagttaaatcaaaatacgtgttatatctctttatctatatacttttcttccttccatttctttttctctttctacattttcactttgttactttacaatctcaaggttattatctgctattaaagttttatctttccaggtttcacaaaaataaattgaataagtgcaaaaataacagatacaaaaccataactattttcttttctataaaaaaatatatcatcaacaagaaacataataaatgaaaataactatgaataaatactctcatttagaagaaatagacaaagatattccttaaaatttaagcaaaatattgtttaaataaaaaaactgactgtcagttaaatgccagtcagctattttatatattttatccaaacatcactatatttgaacattttaataattaataatacttattaatatacaaactttactcatacacagaatatcttttccaaatttgctctaaatcatcaaaatgctgtttaatatcttctttttccttcattccaacagatatagcaagggcatttgaaatactaagagctggaactagagaatctacaaatgaagccatattactcttaactagaagagtgttatctgcaagtgatgctactggcgcaaataagctatctgttaatgatattacatgggctcctttttctttagcataattgacaatttgataagatttcttagaataacgagggaaactaatagcaactattacatcttcttcatttattcttacaatctgctcaaaagcatctcccatatccattctaattatatgaacattgtcaagtattatatctaagtaaaaacctaaatattgagctactacaaaagaactcctcattccaagtatatatatttttctcgctcttaaaagtttgttagaagcttctttaaacgctctctcgtcaatttcttctagtgtagaccttatattatctatatcactttttaaaactttgtttagtattgcaaaatcatcggaataatcatgtgccatttcaactctttgtactgtagttagtttattttttatgagttcttgaagtgcagcttgtaatttaggatatccactataacctaatgcatttgcaaatcttacaactgtagactcacttactcctacggtttcacccaatttacatgcagtcataaatgcaactttatcataattatttaaaatgtattgtgctataagtttttgacccttactcaatctcgtatattgagattgtatatttgatatcaaatgtttactgtccttcatttcatttgtttcttccatttttttctccttttagttatataaactattttgttttattaacactgtctttttctctaaaaattttattttttatctcaatttcatcttagtttttatcatagcttcttaaactcataaaattctaacttttctgtaccttatacttcacatagtattttcgattaaatttattataccatctttccttgcattttttaatatttatccaatatttcttttaaatttttcaatttttactcatttaaaagttatctatcttattttgcatatttagatgtatattttgttttgagaataagctgttgtatacttattatttaaagtatttttaataggtcacactatatatattaactcttaatagaatcttgtcaagttttttagtatttattatgcttttttcttttcaattaaaatcaattgtggtgggttattgacttgatttaaaaacttagattctaaaacattaaattcatcttgatttaaattattgacaaggttatatatgcaatctttttcttcttgacctccatcatgccctgtatatatggcaatgcttattactccattttcttttaacatttctaaacttaactttatagcctttaaagttgtatctggtttggttataattgaatgtttcgctcttggaagataacccaaattaaataaaacacatgaaacttcttcttttatatattgattcattttttcatgcccatcaaatatcaactttactctatctgtatatccttctttctctagtttctttcttgtagactttattgcttcttcttgtatatcaaaagcatatacaaagcccttttctccaaccttctcagctagataccttgtatcatacccatttcccatagtagcatcaattactatgtccccttcatttataatattttctaaataaaatttatttatatctgtaattttagttaaatactttgcatatgccataatactatttctccctactattaactttatttcattttttctcaatttatttttatcttattttattgattttaaatattttatttcatcttctgttaggtatctatattctccaactttggtgtcttttaatactattttccccacagaaatccttcttaaatttaaaactggatgatttatagctttgcacatttttcttacttgtctatttctaccctcatgtatagttatttcacacactgaataatttttttctttattttctttagttacccttattttggcaggtgccgttgtgtaatcttctatttttagtcctgtttcgaattgtcttatctcatcatcacttataattcccttcacacttgccacatacgttttatcaatttcatgctttggatgggtaagcttatatgttaaatcgccatcattagtaagtattaataaaccactagtttcataatctaatctccctattggatatactctttcccttacatctttaagtatgtctattacactgggtctattgaattggtcttttactgtagttatatatccctctggtttatttaatactatatatatataattttcacttggttttacttttttattatcaaattctactatgtctttttcttcatcaatattaaaagataactcttttactacacttccatttacctttattcttcctccaagaattatttcttctgattttcttcttgatgctattccacaagaagctatatacttattaattctcatacttaatccttccttatcttaaattatgtgtgtttaatatttttatcaatgttaattttgctacattattatactatactagaccttaattaaaaacaagcaaaaaaattatttaattttcctaaataattgtaatttcttttcacatactattaatatgtaatagctgactaaacactattttaaggaagtgattattattttaaaggaaaatataaaatattatttaatagtcgtgtttattggaattttattttttaaatttattaatactccatcaaactttatatctagtattgaaggattcttaaagttttttagcccatttttattagctattttacttgctttacttttaaatccacttgtgatgctttttgaggtaaaattcaaagcacatagacttttagccatttttttatcttatatatttataggttttattttagcctttgccattaggctattaattccatcaatagctaatacattaaatagattgataaatgaaatgcctatgtatactgattatatagatagttttatagaaaaaaatatgtcaaacatagattttctaaaaactttaattcctcatatacaacatagtttagataatttattaaaagaagcaagtaattttgttggtaaaattcctaaaaacttcttaatctatacacttagtatatcttctatgctatttaatatgacaatgggatttatactatccatatacattatatatgacaaagaaaaaattgcattgggatttaagagatttctatattcttctactgctagaaacaaggcagataacattatagaattttttaggactactcatgatattttctatgattatttacttggtagaatattagactctcttattattggtataattgcatttttaggatttcaatttgttatcagaatagaaaatgctttatttttagcttcaataatattcttaggtaatataattccctattttggtccttttattggtgcaatccctccaatagccatgactatattatatagtccacaaaaaactatatgggtcattgcatttctatttatattgcaacaattagatggaaattttatagaaccaaaagttatgggtaatcaagttggtataggagctatatgggtaatatctgctattttggtgggacaatctctatttggtttcataggagtttttctttcagtaccaatagctgctgttgtaaaaacttatgttgataaatatatagataatcgtttacaatagcttatctctactgtgactttaatttttagtttaaaatttaactgttatttattaaattatttctcaaaaaatatctcttagtaagaaaaaattgctaagagatattttttataatatataatttgttcattaaatttatgcatatattttatacttattgattatttgagttttgagaatttccaccactatctgaaccaccagtagtatcttgtggagttggtgctggtgttggattactattatttggcttttcttgattttgagaagaactgttattattgtcagacttattactatctgattttttatcattatttttagaactatatttattatttttactacttccactataagaagatttccttgcatctgattcaactctatacctatcttctccagccgtatcttttgcctttttctttctttgttcctctgcttcgttttgttctttttctaatttagttaactcttctttctttttagttgcctcttctttaataacagaggaaccatttttgattttctctataagtttaagttccttgattgcaccctcataattttttaattcttcaaactccgtcatatttgacattctcatagcttgcatatacatagctcttgcattctcattagtactatcttcttccagtgcagaggataatgattccatagcttttttatagttatgtttttctaaatatgtttttccttgctctactaaatttatttcatcttttttattaaatgaacatcctacaagaaatatagataatatcgatattaataaaattactcttcctctcattaaatccctccttgtcatatactttaaattttatcataattataaagtttttaaaatattttatatttattacaagaaatttgttagtaaaacaaaaaataagcagatatgctacgaacgatacaataaaccaaaaattaatttagagatacatatcctagcaaatctgctcataataaactttaatatttaatttttattatatacttttccattttatatctctaaagctaataagtcctcatagctttgtctcttacaaattatcttatcatttccatcaaatactgatactactgctgctcttggtattttattataatttgaagacattgaatatccatatgcaccagttgatgttgttataagtatatctccacttttaatatccattatgtttatatctccaattaatatatctccactctcacaacattttccagctattgttacatgattcatagcctcatgattaattttattcacaatactacactcataactagcttggtacaacgaaggtcttacattatctgtcatacctccatctacacttacataaaccctaacatcttttatatcttttatagaacctactgtatacaatgtacttcctgcatttgcaactattgatcttcctggttctattaccaatgtaggtacttctattccaagctctttacatgaagtttctgctttagtgattatggtttcacaaaactcttttatagttttaggtttatctccttcgctataataaacgccaactcctccacctaagtcaatttctgttagttgtatgttgaatttttcttttatttcttttaccaagttcatcattatatccactgtatctatgtatggttctacatcaaatatttgtgaacctatatgagcgtgaagacctacaagtttaatatttttatattcacttaatttttctattgctctaaataaatctccatttactaaagcaaatccaaatttagaatctatctgtccagtttttatataatcatgtgtatgagcttctataccaggagttattctaaagtatatctcttgagttttacctttatcttcacataatgcttcaagcaaatctaattcataaaaattatccactacaaatttacctacacctaaatctaatcccatgtttatttcttctttagtcttattgtttccatgaaagaaaactttttccataggaaaatttgatttataagctgtatataactcgcctcctgaaactacatctaaacacatttgttcttcatttataagattacacatgtaaagaggtaaaaaagctttccctgcataagcaaccttattttttccctctctagccttaaaatattctatatattctctacaattttgtctaactaaagcttcatcaaatacataaagtggagtttgatattttttactaagttctaaacaactcactcctccaatatataattcatcattatttacagtcatagttccatgaagtttcataatagcctccccaaattttatatattaaatacttctgctattttttctatagctacttgcttatcatcagaatttatagcacaagttatacgaatctctgatgtagttataagttttatcattataccattttcattgaatatcttaaatactttagcagcaactccagaagtatttttcataccaagacctactaaagaaaatttagtgatattattatcaatcactacatgttcttcatctgtatatttagatactatctttttacattctcccaactcttcttttggaactgtaaatgatacacttatcttatctaaaataggtgcagtttggcttatcatatctacacttatacctatagttgctatatcttcaaataagctagatatattttcagctttaaaatcttttattgttatagaactgtcatcatcactagtagctaatcctgttattactttatcctctaatttcatgtcttttccccctcttatatatgttcctttttctgtaccacatgtacgtccgacatagatttcaacaccatatttttgtgcaagctctatacttcttgaatgcattacttgtgctcctaaactcgctaactcaagcatttcttcatattcaatctcatcaagtttactagcctttgaatattttcttgggtctgtaaaataaattccatcaacatctgtatatatctcacattttccatttaatttaaccgcaagagctacagcagacgtatctgaaccacctcttccaagagtggttacatcaccatcttcgttgattccctgaaatccagttactatcacgacatttccttcatctaaactatttttaattctgtttacgtttatatcatcaatttgagactttccatgaagaccactcgtttttatatttaactgataagcattataacttatagctttacatccaagtgcatttaatgctattgataataaagatgctgaaatcatttcaccagtagacattaaagcatctaattccctcttactaggttcattactcaattcctttgctaaagttatatattcatcagtggattttcccatggcagacacaactattaccatttgtggattttcttttcttcgttctattatattttctgctattgattttattttttcagtatctgctactgaacttccaccatatttttgaacaattatactcatgctttctccccctcaagctaaattttgataaataaaaacgcccaaaggtatactttggacgtgtaaatttcatagaccaagtaaccttgtagctcaccactttaaaagtgacagccttatgcatattctgcataagtccagaaaatttgtccgtcaacaaaatttcttcggctatataccctttcatcaattatcaatgcttaccagctcctattgaatactattgaatacagctacctctaccctaggctcattatttttaattaatttattaatatagttttatcatattctatataatattgcaacaattattttacaaaatgtggcaaatcgatagttttcttttctaaagttagcttatatacaattaaatagtttatttaatcctaaatctataaaatttatgctatactcattatcatatctctctaaatcatttaattcggatagattatctggtgtaactaccaaaacgtttggtactttaaaaaatggaattgtagatttatctatttttttagaaagattttcgtatttagaaatgtctatttcattatttaagtcaacatcaactaaaacttgctttatattaccaaattggtctgtatattcaataaataaatcgtatttcacatcatctacactaacatttcggtaaaatctttttacatcacaacctgcagtattgattctaacaactaattctgatcctactagagcctttattaaatcatctcccttaaaaagtttactaccgtttaaataatatacataagagaggtctttataattataataatccacatcacaaggatatttttttagtgtatattcactacacatttttctcaaagtttttttaaaattttttttattgtatcttttttggtctccataaatttttctaaattgagactctgtaacacatctaaccctgctaattaaaagtaatatctctttttccatattcgtcatagtacattctccttgaagtattatttgcaaagttgtactaatattatattaattttatgacattaaatttacaaagaattaaaataaaatagctaatttttatagaattaaattctataaaaattagctatcactatgttaaatactattatcaatctttttatttaaattatacattaccttgattttcagaatctttggaatctgtattttcatcagttcctgttttttcttttgcttttttatcttcaaagtttgcaatatttaggttatcaaattctgacatttctattacaccagattcttcttttgaatacgatattttgactttatcaccaacctgagtcaatggcaattcgctagatacttttgaagtagccctaaatattatatctttatttgaatctaaagttacataataattagtgttaccacctcgcacatctgggcttattcttgtcactgtgccttctaatacctcatcttttaaatcattatcaagttttaaatcattacccttagattctaatgcatccttatagtttcttaatgcttcattcttatcttcacctattccaagtacattataatcttcaacagatacaaatgcaactctcttaacaagaccagccttatcttttaatgatgatacatatgttggctgacccaatatattatacattacagggaacgtcgcttcataatttttttcttgaacattaccttcagctgatttcattgcagccgtttcagtagctcctggttgtttatataatctagcttcttttgttctagaatcaactaacataaatccaattgtagattcatctccacctgaagatgttatacctgtataccaataagacctgttatcattgccataaactaatgatgtaccttctgttggtactaaaactcccttttctgatataacagagtttaaaaatccattaacataaacaccccagtctttaatctggtctgttacaaagctttgtggttgtattctatccacccatttaggtgtgtttttaacatcataaacatttatttttccagtttctgcatcaacagtggctattcctgttgcatttgctcctccatagccaattttatgttcatataaacttacaacccaataaggtcttccttcatcatttatttcaagagtgaaatctgtcataccaacatttacaataccatgtatgtataaatgtctttgtaaatcctgatgtaagtaggcttctggttggtaaactatctttattggctttccatctatttcttgaactaattggacgtcttgaggattactagctgatacttttacataaccacttgtaccacttagagatgttatccatttaattatgtctctgtgaacaagaggcgctacccagtacaactctccatctacattttgtatatgaaattttcctaatttggatacactccctattgcaggaacttctccaagctttttgtcacctaatttcattgccatatcttcatctacaagacgaatgtcatttacactgacagggctaatgtcatcagtaaatttactttcagttacttttcccaatagttctctatatgattttgcatgaagtacaggtgtagaagttataaagggaactactacaatatacacaagcaaagctattgctattgaaaaattatatttagccattttagatgctctttcatttctatctaacatcatatctagtattcctgctacaacaaagaaaattattcctactgaaaataaagatgtaaaatctaatcttagtacaggtaatttaataaatgcataaattattacaattattaatgcaactccatatgttttaagatatcgtttcatttaatactcctctctaaaaaatgttattattattattatatccatatatttacaaaaaataaatatttatcatatttattatatattaagatatctttatatatttatagttctgcttattcaactatatttaacattatacgtgtatgtataaatactttttatacactgtttgtgctatccatcccgcacctaaaggagtgggatttttgcactattctgtattatatatatccaaaaatattataaaaatacaaatattagcagaaatttaaaaactgaagaaagtattctaactaagatttacaaattcttaatcctatcgaagttaaactactatcttcagcctaattatctagcaatatttttttatatgaaaaactctaaatcaagtttttaaatgtttgcgatttttgatacataagaatgttgtctagaattatattctgataataaaccttcatactctaaggttaagccagataaattataaaaatcatttggcgttacttcaaatgcttgtttatttaaaatgtctatctcacttttttctaacatgtcagcaacaaagtttgaacatacatatttatattcagattgtctctgaatattcattagtaaatatattaatgccattgtatcgtaatagtaatcttctctataatcactaattaattttatatttttatatagattttcatattgtaaattatctacttctaacgaatataccctacacacagtgttttttcttatagcatacaatccttgatttatattttcttcaacaaatcctccaataaatggattccttggatttagccttccaaaagaatacattggttttagattttcatttaatgatattgacacatgtgtatacagctttttacttatattccttattaagtaagataatatagttcctgtatatgttgttacaatatagactttattcatcatttccccccaatctagtaactaaatgatattatacacttacaatttaatatcataagatattctaacataataaatgtggttttacaaattttgattttaaggtactttaatattatataatataataaaaatataaatataagttttctatatttttaaccaacagatgttttcttcaaattaatcagatgatttagtatatcttgaacctttccagagtcctttaaatatcctaatgccccatttatttgtgattttaaatctatttctacttccatatccaaatcaacatttcctttttttatagatatatttttaagtgttattgggtaaagataacttttttccaaagtaatcttatttccattaacctcaaatggaacttttttattgtagttacttaatattttttctagcattttatcacttagtttaaattttccaattttcacattctcaagacttacaactaagtttccatcctttaaagtaggtctcaattcaagttcatattgactatttaccaaaccaaataccttatatggtcctgctacctttattttaccatttttcatttcaacaaaattattttcaagttcattaattccatgcttctgcatcaatgtatatattaaatttttaaactcttcctctgaaacagatatttttccaaccattctaagtggattttttactacctccatagaatttatatatgagccttttgataaatattcttcatctatgattttattattttgtgaactaacatcatatctttcttttggtgtcaagatatatacaacaattcctgcaagtactaaaacaataacaattaaacttaacaaaatctttgcaacctttcccataatcgtctcctttacaaatctgtcatcagatttaaaataaatttagataactaacttcacataatattcttaacaatatacatactataatacagtcttttaaaaattaattcaaccaatctaatgttttgtaaataaactgtaaaaacatgtttttagtataaaagttaatattttgcataatactcttaattacacctttatttttttctaatcttggattaaaattaatattatgcaatacagtgtagtgttctgtattataatcaaattaaataggaggtatagaatatgtcaaatgaaacgaactcatctaactttataaagaatattattataaacgacttagaaacaggaaaacatgacagtatcataactcgttttccacctgagccaaacggatatttacatattggtcatgcaaaaagtatatgtcttaattttggattagctaaggagtttaatggaaaagctaatttaagatttgatgatacaaacccattaaaagaggatgttgaatatgtagagtccataaaagaagatgtaaagtggttaggatttgattggaacgagttaaattttgcatctaactactttgatgaaatgtataagagagctttaatactaataaaaaagggtaaagcttatgtatgtgatttgacacaagaggaaatgagagaatatcgtggtactctaactgaaccaggaaaagaaagtcctcatagaaacagaactattgaagaaaaccttgatttatttgaaagaatgaaaaatggtgaatttaaagatggtgaaaaaacattaagagccaaaatagatatgtcttctccaaatataaaccttagagacccaattatatatagaatatctcattcaacacaccataatacaggagataaatggtgcatatatcctatgtatgcttttgctcatccaattgaagatgcaattgaaggaataactcactctatatgtactttagagtttgaagaccaaagacctctttatgattggtttgttaaagaatgtgagatggaaaatatacctagacaaatagaatttgctagacttaatataaataatactgtcatgagtaaaaggaaattaaaacaacttgtagatgagggtattgttgatggttgggatgaccctcgtgttcctacaatatccggaatcagacgtaagggatatactgcagaagcattgcgcaatttctgtagtgaaataggggtatcaaaagttaactctacggtagatagtcaaatgcttgattatttcctaagagaaaacttacaaccaaaggctcctcttactatgggagttttaagacctttaaaacttattataactaattacccagaagataagattgagatgcttgaaatagagaataatgctaaagatgaatctcaaggaaagagattagttcctttctctagagaattgtatatagaacaagatgattttatggaagaacctgttaagaaatattttagatttttcccaggaaatgaagtccgtttaaaaggtgcttattttgtaaaatgtactgatgtaattaaggatgaaaatggaaatgtagttgaaatacatggtacttatgaccctgaaactaagagtggctctggctttacaggacgtaaggtaaaatctacaatacattgggttgatgctaaatcagctataccatgtgaatttagattatttgaaccattaattcttgatgatatacctgaaaatgaaggtaaacatttcttagaacaaataaatcctaattcattggaaatattacaaggttttgttgaacctacacagataaaagattctaaaccttttgataaattccaatttgttagaaatggattctttagtatagataataaatatacaactgacgaaaaatttgtatttaatagaatagttcctctaaaaagttcttttaaaccaggtaaataatcttacaatcaaaaaatgaagacttaaaatataaattacttctactataaataaacttagttagaagtaattttttatttgagtcttcatcatttactttaaatgattaacttttttcactacagattcccataacttctattccatcttttatgcattctatgttaagaggaaaatctggtcctttttctccgtcaatatctgttataagtgaatcttcacattctatatgcacctttttagttttaaagtatagtatttcatttccattatattgatctaaataatcacctctaagcacacttatcaaaactggtattgattttggtattggcattcctttaaaaataattacatccaaatatccatcatctatttcagccttatatgctagatttatatttcctgctgttttgccattaaaaatcaacataagatacatatctccatcataatacatttcctcagaagatacttttatcttaaatttcctcatatacaatgcttcttctattccctttatataataagaaattcttccaaatgaattttttaagtctgtgtttatcctttgtgatacatctgtaaacataccagcacttgcaacatttataaagtacttattattgactttccctatgtctattttctttggttttgaatttatgatttcatttatagcttcttttatatcaaatgaaatttgaagagcatttgaaaaatcatttgcagttcctgtaggcaaaattccaattggaatttttatgtctaattctttcattgcatttactactaaatctacagtaccatctccaccagctatcaatatgtgttcataagaactatcaacttccttaaatgcattctttacaggttctttaatagttaatctatagggtatcaataaataatttttttcttgatataattctatgatagtgtctaaatttgataatatctttttttcacctgaattaggattgtatataagttttacttttttcattatttctccttactcattttattcttttagtatccaaaatcttcatttaaaaaaatcacatgtattctttctggtgttaattgtctttttataagtgtataactacagcatattcttcctggacttgaacagtctatacatataccagtagtcttacatccagtatttgtacttaatcttttacaattggctggagcagctattgtttttgttctttttatagcttcatctacatctttaactattttatttactcctgctataactattactttatcaggtccatatatcatagcagcaactctattcccattcccatctaaattgtaaagttcttcatcctctgttatcgcattagtacttgtaaaataagcatctgcagaaaatgactttctatatatttctttcatttcttctggtttgatatcttttgcatatctatcaagaaaattatatttttctcttataaaatcaatcactcctgtttcaaataaggtcatagaacctccacatcctactagagaacctactttaactatttcttcaatttttttaagaagctcttctttgttacttactaaataccctttcatattattgttttccagagattttattgttttttctattcttttttcattaagccaatttaaattttgatccattttaacttcccccttatttttaatatgtacttaattatttataaactttattgtctttataagtttattttagtacatctaaaaaaaaatacaatataaaacttaaatagttttatataattttttccaaaataacttactcaatcaaaaaaggaaagtagatgtactattctactttccctatattgtatgtagtatttattgcctaaaatctatatattaattatatgtttcatattatataatatcacagttaattaaaatgtaatactatcttctttttaaacatataaattgtattattaaatttaatatatccaacttcaataaatcttattaatttgatgaagaagatgctatagctgcacttgttgctgccattacacatgcaatttgaatagcaacaacaatatttaaaaatatattattagttatagagcctatattattctcatttcgtatcaaatctgcataaattgaagctacaatagcagaactaatcattactctattactttttcctaaagaccaatttccaaagcctttttcttctttaagtttatttgaaacattttttatctcttctattatttcatcttctctataatctaataatgaaattgctcctattattggatatccataataattcattttacaatcattttctttaaatgcttttttaagttcaatagtctttttacatttaagcatagttctatcatcactaaataaaagaatttgggataatgcttgtaaatcatttcctttataaaaaccattttcatttagaaattcataacatttttctatgtattctaaatcttcatctaaattttttgaatgaattgcaataagtgctatattacaatagtcatcactagaagttagaaatggatgttttttcctcatgtaatcatatattattttcatttttgatatacatgtaagataatccattttctctctattttcataaactattgatgctgtaagtggtaaatatgtatcgccccaaaacttttcacttttaagttctttgtatatatctaaaatcatcttaaaactactttctggatttgattcaaacgaaagtagtgttgccatataaaacatattatatcctctaaaattagagaataatccagtattttttttaataagctctattcgttcttccactaatctaggacttattctcttgttcttaagagtaaatgcaagtgcacaactatgttgtatcaatcccatttgccaagaacctttaacttcatttaatgctttgtaattttctattaataagtttacttttccatttataaacgattgttccatattgccctcctagtaatatatctcattgtactaatagttttatatttattatatatatattaaatactacaatcaatacatattacttcaaagaacatcattcttcaacaataatgtagccttttttgtaatgtcttcccatattattgactctatcatagtactctgattcactttcattactccatttgggcacaaatacatctattgcattagaattactaaaatacttactagaccccctatccataacagtttttaattttccatctacaataatcttagttccaaaactcaagtgattgtttgctacaaaaccatcttctaaatcatctcctgtagcagttatcgctccatatccattttcttgattaagacttgtgtaataactaacttcaaaagttataggtactaacttctttattttaatacctaactgattttgtagtttctccttttgtactttcaacttatactcatcactatttttataatcttccataccttgattatacttggaattaaagcttttacctgactttactatagtatctatatttactatagattctttacaatgatctgcatctatttttgtttctccatttaccaataatggagttaaacatacactacatacaacacatgtaatcaatgcttctttaagcttcataaattccccccttattattttgatatattagcatatttaatattatatgtctatatttagatttaaataccacacccatttgctttaagaagttgtcttatatttaattcaccttaaacacttataaatcctctatcttagaatcatatagaataaagcttttatcgttaaatattttttattaatcttttaaaatctaaagctactttatttaattttctcttttttagaatttaagaattaaaattctataattttaaaacatattgaatttatttttttgagatgatataattttcttaagaggtggttgatatgataaaaaatacaaaacaaattacagtagaagttaatgaaattttattacaagaaatatctaagataactaatgacgaaaataatattttgacagatttgataaatgaatcaattgtaaattatattcttgaaaacaaaaaacataacattgaaaataaagatttagaagaagtgattaaattttacaaaaaagaaaatactgaaaaacctaaaagtgcagcaagagctatagctgaagcaaaaactcataccctgtattaatcaaataaaaaagttcctaaaaactaggaacttttttatattaataattattaatatatctcaatatttatctcaaatttatcaatataagcatgtttaatacaatctattgtatacttatcttaccctagaaataatcaaaacaaaaattatgccctttatatctaacaattaatttacatgattaatatacaaaaattctgacttttaaattcgtatacaatatcaaactaaaataatactaatgacaaacccaatataaattaaattcaaacaggtttgattttacatcaaacttattgtattaatattaaataacaagacaaaatatttataaaaattacaaattttacataaaactttatattttattcatttaactaattattgtaaaaactatttattttatgataattaactacaccaaattattcatcttttttaatatctttaacccatttttcaacagagttcaattcttcttcatttaccccctttttgaacaaggatttcataaaactctcaatagaacttccatgcatattatctaaaaaagtttttgtttcaaaatgtaaatactcttcttctccaataagaactgtataatgtgtatgtctatcaatctttcttgcacttaagaattgcttatttactaatcttgataaaagtgttagtgttgtagtttgcttccaattatatagtttttccatagcttcaatgacatcttttgatgctactgtaaaatctgaactccaaataaatttcatgacttttaattctgctggtggtatcttagtaatagtcatatgattttacactcctctcaaacttctacataattaaatactatattaatagacttttcgagtcaaaggttttatttaaaatatctcatccaaatttattaatacaaaaaatttatatttttattcaaaattaaacacacaatctattaatataaagataaatatctattctataagtataacagattatcaaattaaaattctaatatttgacataatatatacattttttaaataaatatatacaatgtattaaaatgtatgcaactctatttcaaaattattttgtgatatatatatgttataataaatgtataaaattttgattggtgggttatatatgaatgcatttattagaaaaagaaataaaaactatgttgtttacctggaatttgaagatgaaaagacaggtaaaagaaaacaaaaaaatatgggtacttttgataaaaaaagggaagcaagtaaaagactaaatgaggtaaaagaaagcttatataatgatggttttttagtaccaagcgaaattacagtgtcagaatttctattagattttctaaataaatatagtgaaaatatatctttagctacatataataattatgttagtatttgtaaaaattacattaatccatctattggaaaatataaaatacaagacttacatccggttcacatacaaaactacatagataaactatcttataaactaaatcctcaatcaattaagattcatataaatatattgaaacttgcaataaaaagagcttatagactcaaattaataaaagaaaatgttatggatagtatagaggctccaagatataaaaaatttaaaaatgagatttatgatagagaacaaatgataaaattattagatttagcaaaaaatacagaaatggaattacctattaatttggctattggattaggtcttagaatttcagaagttttaggtctaacttgggataatattgattttgaagaaaatacaataacagtaaataagataacttcccgaattaatggttctgttattctcaaagagccaaagacagaaagctctgttagaaaaatatcttctcccaaagaattaatgtctttattaaaagaatataaaataaaacagaataaaaatttattaaaatcttccattagaaataataataatttgttgtttttcaataagaaatgtgaacctattgctgaagatgttatgagtaaaaaatttaaaagatttttagaaaagaatgaattacctcatattagattccatgatttaagacactcacatgttactttacttataaattctaaagtacctataaaggttatatccgagagagtaggacactcaaatataagtactactctaagcgtttattctcatgtacttaaagaaatggataaagaggcttctgacaaaatttctgaaagtttatttaatgctaattaatattaatttatcttagctttaaattagcttagcttattgagatagattcattaatattaaatgtatctatctcaaattaataactacttaaataatctgttttattttaatttatcgcctcagttattatacttttttatgaaaaattatactttacaataaaaaagatatttccttatagaaagtatctttttaaatactattttattatatacttgctaacattggaatatctaacatcttcttcattacatcatctactttttttgctttatattcattgtatccaattaaatatcctttttcatatgaactttttaaaatctctttttcatataaattatcagatttggcttctgtgacacttaaattataaagccctttacacccatcttcataacctttattataccctttttctgcaaaatagtttttatgatttttttcgttatgtactgaagatattgttactccagaattttcttttgtactagcataaggacaaaaacctttatttggttgatgtgctgaatgtcctccacaataataacgtgttaactctgatttatttttattatgatgacctcctgatgaattatgccctcctgagtgagcatatgaaaaattccctacactaatcatagctaaactcaatactacagctactaaccttttcttaaccataatctattccccccaaaatgttatatatttttattatatcatctactatattatatttaaattcttaatatacaaaatattactcgattctgctaataaacatatttaaacaacataaaaaacctcctaatatttgattaaaaatttacacactcatgcatagcatgtatcaaatattaaaaggttttatactaataattatttatcttttccatacattttagctaattggtcttgtatctctttactttctaaatactcatcaaagtccatttttctatccattattccatttggagttatctctataattctatttgctatagtagatataaattcatggtcatgagaagtaaataaaagcactcctgggaacttttcaagtcctttatttacagaagttatactttctaggtctaagtggttagtagggtcatctaatacaagtacatttgcatttgaaagcattagcttactaagcatacatctaaccttttctcctccagatataacttgagcttcttttaatgcttcttcacctgagaataacattctacctaaaaatcctcttataaaactttcacttttttcttcagagaactgtctaagccagtcaaccaaagaatattctactccgtcaaaaaacttattatgattttttggaagataatcttgagaagtagttactccccatttatactctccactgtctggttcaagttctcccataactatgttgaaaagtgcagtagtagctatttcatctcccataaatactactttatcatctctatccaatctaaatgacacattatcaagaaccttaaccccatctatagttttagttaaattgtgtacttctaaaacttcattcccaatttctcttgcaggtgtaaatcctacatatggatatcttcttcttgatggttgtatatcttcaacttctaatttctctaactgtttctttcttgatgttgcttgtttagcctttgaagcattagaactaaatctagctataaattcctttaattgagctatcttttcttcagtctttttattttggtccttagccagttgtaaagccaattgacttgactcataccagaaatcatagtttccaacgtacatttgtattttaccaaaatctacgtcaactatattagtacatatttgatttaggaaatgtctatcatgtgatactattataactatagactcttctaaatccattataaaattatttaaccagtttattgatttaaaatctaagtggtttgtaggttcgtccattaatagtatttcaggcttaccaaaaagtgattgtgctaacaataccttaaccttttccccaccaactagttccttcatttgtttgtaatgcatatctttcgttatgccaagacccataagtattttctcagcattagtttctgcatcccatccgtcaagctctgcaaactcaccttcaagttcggcagcttttatcccatcttcttcattaaagtcttccttcatatacaatgcatctttttctttcattatgttccaaagtctctcatgacctcttataacaacatttaaaacagtttcttcttcatattcaaagtggtcctgttttaaaactgacattctttctttatcagttatagatatactacctgtattaggctctatttctcctgataatatttttaaaaaagtagattttcccgcaccattagctcctattattccatagcaattacctttagtgaattttaagttaacatctttaaatagttccttatcaccaaatctaagtccaacacctgtaacttgtaacattaatatattttcctttctttttgctcataatttattttatcataaaactttgataacatttttattatatattatcacgtaaatagtatattttttatactaaatttgtgaaatatttattaaaataatactaaaaattgtaaatttataaaaattaacaatctcttatattatacttataaagaaatcaaattgcaactttattcattcttttacacattgaaaataagttattataatttctaaataaatatgcttttcttaaaacatcattctagctgttttgtttcatatttaaaaagagtacttaatttgtaaatactcttttttaataactttatattttagcaaaattacatgcaggataagtacatacatcacagttcatacaaaggccaccatgaccatatctagctatatcatacttatcaagcttttcatcaattaaaaccctagataaaactatatcaaatactgtagttttatgatacattgcgcatcctggtatacccataattggaacttctccataataagcaagtaaaaacatagctcctggtaatattggtgaaccatatgtcactaaatcagctccagtttcttttatagctgttggcgtaacatcatctgggtctacactcatcccgccagtacaacagataagttctgctccttgacttataaattcttttattgcactctttataatttctttatcatctgggcatatagtctgtcctataacttcacaaccaaagccttttactttttcttctattactggtccaaatttatcaacaattctgctataaaacacttcatttcctgtagtaacaattcctactttcttaggtttaaaaggtactacatttactatttttctattaccaactactttttttgcatcttctaattttttctcatctataaccaaaggtatcactcttgttccagctacttttaaacctttatttactataaaattattatgaagagtagccatcattatttctccaacacaattcaaatcaaaaagtgcatcaacatctatctttaatagaccatcacatgctgctataaaatctatttttccttcttttatttcactaaaatctaaattttctccagcagttagttcttttaaaaacaatgcgccttcattttcatgaaccattccttctgacttttcccatacatacaaattatctttaccaagagataataacactggaatatcttcttcttttactatgtgaccctttttaaattttcttcctttaaattctccaggtattatttgagttatgtcgtgacataaaacttgtccaacagcatctatagtttttattagcttcataatttacccccgattctctcatagtccatttttgtatcgatatcaaataacatttctttaggaacttctacatactttatttttgatgaattttttaaaatggttttacctttttcatcttctttaagtgccaacaattcttctttcttactatatgggaatatgactggatttccacacatatctttgtatcttggaattactataaaatctctatctaatttaaaagtatttataattttatctatatataagttatcaataaatggctggtctcctacaaagaacatataaccatcacattttgagctatttaaaactcctaattttatagattcactttgacctatatttgcatttttattatctatatattcaaaaccatatttattacacaataacaaaacctcttcatattgacttactactacaacttgatgaaaatcaatcttgctaacttctctaaatacatgttctattatagaacagcctttataatttaataaaagtttatttgctcccattcttctggcaaagcctgatgccattatcactgcatttatcatatatatcatccttggtatttataatatattgatagttctatgatttttataatatctctattgatattatctatatatataatatcatataaactattttaatacttcaatatcttacacaaaatttttgttttacgcttccataaaatatctctatttcactttcatattctttaatattttctattaattttatagctaaatttttatatttttcattttcaactttattaataaataatactctttttccagaataatttttaaataatccatttggatttaatactatattttttaagttttcaatacttactgtagaactactattaatactacttgtatctaaatttgctatttttttaaatatttctactctatgtatattctcttcattaatattcattccaaatgatgttatatctaatatccctatggtttttgtagttttatgatatactactggttctttagcattccaacctttaagtttttttctctttgagccatctccctctattaaaactaaatcaaattggtctacaatttcatccaaaatagaggaatcaatacttactaatttattttcattatttatataactgccacagactgttattccatgacaaatagatggaataacagttccatctattgtaataattatattgtcataatcgtttggtacatatattttagttgttgttgtaagaagaactttcaatttatctctataaaaatttgcaaaatagtttataaacgaagtttttcctcctgctccaactacagttattatttcattcttttctattatatttgatagttccacactttcacctcttataaccagttttctaatctcttaattattatagttagacctttttagtaaaagtgatttttgaaattccataaactcgaaagtaaatagattctgttgtaaacaacaaggcggatccaattcgccgctaagctgtaagcttacgctatcagtttatcttttaaatataattaagatattcttactctctgtggttgctttaatatttgaggattattctgtaaattagataaattaactacttgtgatttttttagtatattaagactcgcatttacatctgcatttataatgattccaacactggatttgtactgtccacgtgttattctttcccctttaaagtcatattttttaacattgtccacattgatatcaggtagaaaatcatcagcaaaaaaatcagacttactagtatagctttcttcttgcctaataaaattgatattttttattttacatagatattctaattttccttttatctctccaaatgggattcttataaaatttctatatatttttctctccatattatcacttttttctaacttagcattatatcctacaattaaatttccaatattattttttacacaataatcaattatataaaaacaggttttatttacatagtctttaacttgattatttctcttattccaaactttaaattgttttcttgttattgcagttatattcttttttaattttaaggattctattttatcattctgtttgtttgcccactgattcacagattttagcctttttccatctatgataaaactatcacctaaattggtaacacatgtacataaattttctaaacccaagtctatagctagtgcatttttttgatttgaaacttcctctgatttcggtatttcataacaatactgaatttcaaagaacctagctttatgtttaggtattattcttatttctttaatttttttctctagtatattttgtggaacttttatacttactttcccatatagttttttaaatgctggagacataggtacatttaaaatcccatcttctttgattcttatttgacctattattatgctaaaaaatccttctttatctaaatatttaggtgattttatccctctaaagtcatatttcccttctttggctaatttaattaacccaaaaaatgacctaaacgaactgtctacttcttttaatatttgttgcgctatattactattgagaagcttatagttctcattttctttgcatacatgataattagcttcatagttaagatgttctccttgattgaaataatgctgtcttacattatatgtaccaacattatataagttcttagctaagaagcacatctctcgtagagcttgatattcttttttagttaagttttttaattgttgtctctgagttccatagtgtatattttttattctgtttgacatgaactcacctcctttagaatatactctactagacattatatacggtatttttacaaaacaccatatataatgtccatttaattactttattttacaaaataatttaaatttacttgcttttatacaccttattatttattataattgtttattattatttttcatacccatataaactttttcaaaagtcataggaagctctcttaaacgaactcctgtagcattaaatattgcatttgctatagctggcgctggtgtatgtataactatttctcctaatgatttagcaccataaggacctcctgggtcgaaattctcagcaaaatctaccaatatatttccaacttctttttttgtaggaactttatactgtaggaaactatctgttaataatctcccatctttatcaaatatagggtcttcatacattgcaaaccctatacccatcatcacaccaccttctacttgtattctagctaaagttggatttataactgttccacaatcaggtacacatgcaaaatttatgaccttatattcgcctgtatttttatctaattctatctctgcaaatcctgctataaatggttttatttttttcaacatgccaaaagattctgttgcttccaaaactactggtacatcatcactagcaaatcctattcctccaacagattctctacccaattcctctaatagaacaaacttgctattatcgtttttaacaaaaaccctgtcttttcccaactctaaatcttcttttttaaatcctagctttgactctgcaactgaaagtaatatatcttttaatttatttgctgtctttattgttgcatttcctgtaaccgttgttgtacaagaagcaaatgctcctgtatcatagggacataaatctgaatcacctgtataaatagaaattctatctacagtagtatttaaagcttccgcagcaatttgagcttgaattgtatcagccccttgacctaagtcagcaagaccagataatagtttatatgtgccatcttcatccattcttatagtgactgttgccatatctacacgcggtataccagaaccatgatttgctactgccatacctactgctcttactttgttgtttcctatatctttacatggatatttatcatcccaattgattaatttcttgcccttttctatacattgtctcagctcacaacttaatatttcgtcttcagctgcttttccattggtatacctatctattatatttttaattctaaattcaagtgggtccattccaatcttatgtgccaattcatcaatagcactatctattgcaaatattccctgtgtagcaccataccctctaagtgctcctgctggtaacctattagtatatactgttctagcattaaatctaacagcatcaatatcattatatattggtaaggtattgtgtccagattcggaagaaacagagacaccattcccaccataagcacctgtattgtttaatgactttagctctattgcttttaaatttccttctttatctgcaccaactttaacatcaaaaaacatttcatgtctactattagaacctacaaaagtttcacttcttgtaaatacaaattttgctggtctaccagttttcatagtaacaaatgcagtaaatatatctgttgctgctatattctttcctccaaatccaccacctattctaggtttaattactcttatttttgaagatggtatacccaatacttttctaattattctctttacattgtgtggtgattgtaatgatgaaactacaacaattctatcatttatatctttatatgaatatgacctatgagtttccatcatgcaatgcgattgactttgggttttgtatgaagattcagccacaaaatcactttctttaagcttagcttcaacatctccaaattcaaaaaattcttttgatactatattattttttgcatccaatccaaaagggtatggctctactatgtctttttctggatgtataacaacttcatttccttctgcttctcttgcatcaaacacaggctttaaaacctcataatctacctttatcatttttaaggctttaagtgctgttttctcatcttcagcagccactaaagctacttcatctccaataaatctaactgtatcttcaagtaaaactctatcataaggtgatgcttctggttctgtttgacctggcacacaatatctgacctgtggtacatctttatacgtataaatacccacaacccctggaattttttcggcttttgatgtatctatattctttatcttagcatgagcatgtggacttctaagtagttttaatgtcaaaacatctttatgcataatgaggtcttcagtatatagaggttttcctgtgacaattgctgtactatctatctttcttatccccttattaatcattatacattccctcctcaatagcattatacatccttttaactaatgcacttgccatatcctttctgtactctttactagctctcatattacttccataagtaagttccttactagcaacaatagatgccttatctatatctttttctttatttaatatattactcgcttcaagtgctaatctagctttttgaggtcttgccccaattgctattttgtaagtatcattttcttttagcattgctgaatttaatacagaaaaatctcctgtgcattttcttattgagtcaaaaacagctatcgcatctttttttggtagtattacttcgaccaatatatccctacttaattcactatccaaaaactcacttaactctagtattcctttattgtataatctcaccttcgctccaacaaccaaaagcgctggtattaagtcagaaaagccatactttgaaaatacacttgcaccaattctagccccttgtctaaattgaacaccaactatattagaaacagcgcttgaaagtattccactacagtaattttttatagttttatcaatttctaaacttctaagtgaagtatctgcacctatcaaaatatttttttcatcctcttttatataatttagatttatatcttttaaatctatcgctgttcctatatttttattacttaattttataaatccacatccacctaaaataacattattttttttagaaattaaaattttatatgcttcttctaaactctgtggaattgaatattcctttatagtaaccatcttatcccccatcattaacttattaaaacacaaaagtttttaataaatcttttatttatatttataattgtagtatatttaattcacatatattaaacctttacattataaacttttatttttatcctcaaccttatcacttttatttccaggaaattttaccatatataaagcttgaattattatggctaccattgctcctgaaactacacttgaatctgcaagtaatgtctctataaattttggaaatttttcaagaacttgaggagctaccatgaatccaataccagaagccatagaaagacctaatatcatgctattttcttgattaaatccatccatactaacaagtcttaaaccagatgttgtaagagttgaaaatataacgagtgttgctcctccaaccacacagggaggaattgttcttattaaattagctaataaaggcgatattcctgccaaaaataatccaattcctccaatagctagtacaaatttacttacaacctttgtattggaaacgattgcagaattttgtccaaacatccccattggagttgcagaaaataatgcacctattgtagagagtactccatttcctaaaacagcagaagaaagttcttcatctgttacttgtctattaagccctcctaccgcagaaagtgtacaagcacccattatatcagctatctcaactaaatatattattgaaaacattacaacaacttcaagtcttatatctagcccaaaagcaagtggttttggaagcgcaaccaaagtaaactcctgaattgaagaaaaatttactatacccaaaattaatgataaaatgtatccaaaaattatgctaactaatattgatgcatctttaaataatccttttccatacttatttaatcctaatatcataagagatacagatattccaactataaaattaattggattcccaaaagtctcattgcccatacccccagctaagttttttatagctattggaaaaagtccaagacccatacatgcaactattgttcctgatacagctggagtaaatataaatcgtatttttttaagaccaaaaccaattataattattactataccagctattatttgagagccaaataatactggtagtccatacttacttgcaacagataccccagctcctataaacatagctgtagctcccattataactggtattcctcctcctaatttaaaacctttaaacaaaggtattggatataattgtaataaagttgataatcctgcaaaaactaatgcggcttgaatcaataatgttgacatcttatgattaagtccagatgcatttgcaatcaatatcgctggtaaacaactacctattaccattgccattaagtgttgtaaccctaaaggtattgcttcctttagtggtggtattccgtctaattcaaattttgatgtactttttgctttcataataaaaactcccgttacataaaacttattgaattatataaatacttaaaaatctaatatattaaattaatgatgttcataaatatcaactatactccaacatatatttaagtttttagtcttaaaaaacagatgcaataaatttaattattaacaaatacacgtattctttaattttgtatacattatataccatgctttacaaatataagagtattatagctatgaatttttaattttttatagtaaatttaattcaatttaaatctttcaatcttaatcattataagttataagttttcataagtatttacatgtttcaagttttaaacatttacctataaacgctactttatagatgtcacttcaaatctagtgacctcatactttcatatgagcgtagactatttcttcatcttcagcattacctgctaagagcaacccgtttccactatcaatcgcttatagtgtactctctctcgagatagtcgtttgaccttcctatttctaggcttggcgaccaaatgtccatttttaagtacttaggctctcaccatataccatcctcactattgtttctggttttcaccacattcataaaagtttctttctatcttttattgtagttgcaaggctttaggatttactggttttaaagttgtgtcctacatagatttctctatgtacggggccaaaagtacaatttatttaacatactttgctttaccccctgtaaataatattatttactctttcactgtttttgttattaaattaattaaatatcaattaatctaagcataaaataattatttaatttaaactcaaaatatttatgaatattttataatataattctcataagacagaaaaacttaataagctatgtatctcagttgtaccaatgtactctcctttactatatttgtatctgcaacataaaatatacaagtttctatctatttatagatatatatatctataagcaaaatagtaatattatttttatagtaaaaattttattcatattactatttataatttttatagagcaattttagtgccaatatttgcatacatttgtatagtataaaatttttatgttctcattgataaaattttacttatttcaagcgttttattcgattttatcatctaaattttaggttttatttttataaattaattgtatttacataaaaaaaaagacctaaaaacaaatttttaacggtcttttctcaattttttattttcatttctaaaatttataataaatagtaagaacactataaattcttttatataaaattcttagtttgtggatgataaattagtgaattaaaatactactttactgattttagtttgacaatatcactccaatttttactagtggctaactctactaaatttaagtctcttcttatttcagctatatcctcttttatagaattagtgtcaccttttatatatgctatgttatgttctatattatcatgagtagctttatttatttcagaattatgtaataaacttcctaaaatattattctgttctatctgtatctctttcattgatttatcttcacattctagactatcaatcttaatttcaattccatataatttttcatttgctatggatacctcgtccttaattccattcatatcttcattaatgttatttattttattttgcataaagtttacttctgatttaacttcggaaacatcttctttcattacagttatttcttgtcttacttctgacatgtcttttttcattacatttatctcttgttttacctctgatgtatcttctttcattacagtcatttcttgtcttacttcagacatatcttctttcattatatttatctcttgtcttacttcggacatatcttcttttaatacatttatctcctgttttacttccgacatatcttctttcattacagtcatttcttgtcttacttcggatatatcctctttcattatatttatctcttgtcttacctctgacatatcttctttcattacagtcatttcctgttttacttccgacatatcttctttcattacagtcatttcctgttttacttccgacatatcttctttcattacaatcatttcctgttttacttccgacatatcttcttttaatacatttatttcctgttttacttccgacatatcttctttcattacagtcatttcttgttttacttccgacatatctccttttaatacatttatctcctgttttacttccgacatatcttctttcattacagtcatttcttgttttacttctgatatatcttctttcattacagtcatttcttgttttacttccgacatatcattttttatgctaactacatcttcatttatagtatataataactctaaaatcttctcttgcacttgcatcaccatccctattaattattataacattttacacaaatgctatacaatgttaacatatatatcagaattattaaaattttaattaaacaaaattgattcactttattacttcaaaactaattaatatctaaaataactacaaataaacaaaaataaggtcaacaacaaaaaaggcttatctctttgagatagcctttcttatttttatttaaaactttgttttttataaaataatctatacattcagctctgaacatgaaatttttcttccaagtgcttttggtttacaaactgatatacaaagtccacaatatctacactcttcttcattcaattccatcttatcattcaattttctcgcttgatatgcacaaactctctcgcacatcttacatttagtacatttttcttcatcataagtaaactcaaagctaagtctttcattaacatctcccatatgattatgtactataccacaagcattttctatagtattatatcctaatctattaagattagattttaaatcatcatgtattttagatattacttgtgcgccttttaaaattactactgaacatataccaacaaagtcagcacctgccataatcatttctaaggcatcatctccacttacacatccacctaagccaattattggtatattaacttgtttttttatttcatatattctctgtaaagttattggcttaatagtttctccacttaaatatcctattccatttccacctaataaaggttgccctgtttctatgtctattctaaatgctggtcctacagagtcacaagcagttattgcatctgctcctgcttcttctaattttttagcaaaatcgcctatctcatctatcataggaggaagtttaactattacaggtatatttactctttcctttgcatctttaagcattggtatcaaatctctatagtcataagatactaattcaataaagtcagctcctgcatttgcaactttctctactaattcgctactttcttcaattgtatgacctactgaagctatacagacagtcccatctcttttcatttgtggtatttcaaaatctatccattgctctggctcaaaatctgtccatttttcattatttaaaagagcattagctgtatttctaaccatatgtggtgctggatttatagctctttcttttcttatagtcttagtcacaactgcccctgctcctgcatcacttaatatcttgcatccagctgcactatatgttaatggtcctgaacctattataagtggtgattttaattctttacctaaaaaattatacattatctgcttccccttttcatatatatttacattcgttaaaatttccaaaattcacaagcaacttctttcatttctttaacaatagcttttttatctaaatcaactaactgtttttcttttaaaatatgtctaccatctatgtatacatttgatataaattcttttttaccctgaactactatctggtcaaatatattatcaagagtcacaggagttttaaattcatcttccataactattatatcagccttattaccaactgctattttaccagaattttgaagtcctaatacataagcaccatgctctgttgccatcctaaatactaaatttgctggcattactgatgcatcttcttcaactgatttatgcattaaaaatgcacctctcataacttcaaaaaaatcatttatatatccatcagtacccagtgccacttttatgccttttttaatcatttttggtactggagaaaaacctccacctacttcacagttgctaagaggcatatgaaccacttttacacctttttcttttaatatatctatttcttcatcatttacttttacacactgagatgctaatacagtttcatccaatatatctaaatcattatagtagtcaactgcttttttgccaaaatgtttttcagcatagtttggctcatatatactctcacataaatgaaattgcattggtgcatttaatttttttgcatcttctttagctttcttaataaatctatcagaacatgtgaagcttgtatgtgtacacattattccatttattaatttactattttctctactccactttattaaattagaattttcatctaaacatctaagtccattttcaaagcttattctttcacaactttctaaggataaaatcgctttcatgcctatttcttctagtatttttccttgctcaattaaagttccttcttctgtatttggagcttctagggtatcacaaaaagctaccacaccagattctataagttctattgctgatgctttagttgttgccttcacttctttcaatccaattctattttctataaatggccaccaatagtcatttaaaaaaccttcaaagtcagtaaaatgtacatttgccggtattcccctagaaagaactccatattgatgcatatgaccattgacgaatcctggcattattatagcatctgatttatctattatttcttcaatatttttatattttatttcaacttcttcatttggcaatatatcttttataatgtcattttctactacagcagcagaatttgtatatatttcatcagcagaagatattaagtatttacttttaatagcaatcatttatttacctccctgatttaattttttcatggccatataaactttctcagaagttataggaagttctcttatacgaactcctgtggcattgtatattgcatttgctattgctggtgcaggtgtatgaataactatttctcctaaagatttagctccatatggacctgttggctcataattatctacaaaatcaacaattatgtttcctatatctttttttgttggaactttgtattgtaatagattagaagtttgaagctttccatcagaaccatgtctagggtcttcatacattgcaagccctataccttgagttacaccaccttcaacttgtattctagcaagtgcaggattcataactgtaccacaatctgtagaacaagcataatttattactttaaactcccctgttgttttatctaactctatttcagcaaatcctgctaagaatggtttagcactctcttgtataccataagattcagatgaatataaaacttcttgatttccaccaccaacagattcttttcctaattcacttaacaaaacaaacttctctacatcttcactataacaaactctgtcttcatatagtattaaatcatctattggtaaatcgagtttcttctgtgctacttttaatatcttttgttttaaactttcagcagattttattgtagcatttccagttacataagtagtacaagaagcgtatgcaccagtatcatatggacacatatctgtatctcctgtataaacggaaattctatcaatagatgtattcaatgcttttgcagctatttgtgcaagtattgtgtcagaaccagttcctaagtctgaagacccagaaaacaacttataagttccatcttcatccatcctcatatttactattgccatgtctatgttggctataccagaaccatgagttcccacagacattccaacagccctcaccttattgtttccaatatccctaacagggtacttttcatcccatccaataagttttttacctctaattatacattcatcaagtgcacaacttcttattggaaaattcattattccgccttcagtttgtttttttataatattctttaactttatttctgttgggtccatattaagtttatgcgctaattcatcaattgcacaatcaagtgcaaatgtaccttgtgttgctccatatcctcttaatgctcctcctggaactaaattagtatatacagttctcccatcaaattttattgcaggtacattattatatgttggaagtacattatgacctgattcagagcaaactgaaggtccattatcaccataagcgcctgtattattcaatgctttcatatctatagcttttatgtttccttctttatctgccccaatttttatatcaaaaaacatctgatgtctagtattagtcattgcaaaagtttcttctctagtataaattagttttgctggtctttttgtcatccaagttacaaatgatgcatatatctctgttacagctatgttttttccaccaaaacctccacctattcttggttttattactctaacttttgaaagaggtattcccagtgctttagaaacctgtcttctcatatgataagctgattggtttgcagaagttactactaatctgccattcgtatctatatacgtataagctctatgagtttccatcatacaatgggcttgtgattgagtcatataagaatgttctactattacatcactttctttaaactctttttctacatcccctttacccattttttctctcgatacaatattttttgtagcatccaatccaaaatcaaatggacaaaacaaatcatcttcttcatggattaaaattttatttccttccgattctcttgcatccaatataggagtcattacttcatattcaacttttataagtttcatagctttaatagcagccctttcatcttcagcggctattatagcaacttcatctcctacatatctaactacgtcttcaagtattaattggtcatgaggtgatgcttctggatatgactctccaaccattgaatatctataatttggaacatctttgtaagtgaatatgtttactacaccttttacctttaatgcattttttgtatctatgttttttatcttcgcaaaagcatgcggacttctaagaagcttaattgttaaaacatctttatgaaaaattaaatcttctgtatatattggttttccagtaacaatggcttcactatctatttttcttacctctttatttaccatcacactcacctccaatactattatacattctcactactaaggcttttgccatatcttttctgtattctttacttcctcttatattacttccaaatgaaagttcttcacttgatacttcaccagctttttctatatcattttctaaacttaatatttcacttgctttataggcaatttttgctcttcttggtctagcgcctatcgcaattttataaatacttccttcttttaacattgctccatttaatactgcaaaatcacctgtacattttcttatagaatcaaatacacctatagcatcttttttaggtaatataacttctattaatatatctttttcaagctcactttctaaaaaatcagctaagttcataaccccttttttatataacttaacctttgcatctaccactagtaatgaaggtattaaatctgaaaatccatacttagcaaatacgctagctcctactctggctccacttctaaattgaactcctactatattagaaacagcgtttgaaattaccccattacagtaatttttaataaccttatttaattctaaagttcttaaacttgtgtctgctccaattaatatgctatcatcagtttcatttatataatctaaagctaagtcttttaaatctattgctgagccaatatttttactacctagttttaaaaatccacatcctccaagtattatgttgttttttcttgatattagcagttcataagcttcatctaaactttttggaactacatattcctttatagttatcatactctctccccatatcaacttaattttcacttaaaagtctaagtgtttaaatatttatgtattgctcttaattgacctttatatcctgtacatctacaaaggttaccatttacataatctataacttcttcttctgttggattttgaagctctcttttcattgccaaaaccatcattataaatccaggagcacaaaatccacactggtcagccccttcgtctgcaagaaaatctccaaacttctttgcttcatccaagaccccctcaagtgttgtaatatgctgaccatctactctagcagtaagataattacatgaaagcacggccttgtcatttaccatcactgtacataacccacatgagcctgtatcacacccttttttaacacttacatatccattttctcttaatgtatctgctaaaaaatcatctggtcttatacttaattctttttctttattatttatggtacatttgataatcaaataaatcacctcaaaactcatatttttaagctaaagttttactatacttttctatgaataaattacatttattaataaaggctattccatttatgaccttccattctattttttatagttcctcttacacaaagtctctcagctgtatcttgagcatcttttaatgctttctcttcattagctgtcaatatttttgaatcttccattattatatttccatctactataacactctctatatttttcatactagaagaatatactaatgtagataccggattatgcataggtatcgcttttggtgaaagcattggattaaatattagtaagtctgcttttttacctatctccaatgaacctatctcatcttccattccaatagctcttgctccatctatagttgccaactcaagaactttttctgccgacattgctaatgggtcacacttattaactttatgttgaagtgctgttaatttcataagttcaagcatatcttgagagttattactagcggctccatctactcctaaactaactgttattccttttttaagcatttctggcactggtgcaacacctgaagataagtacatattacttgctgtattatgagacactttcatatcgtattttttagtaagttccatatctttttcagttagatacacacaatgtaccataagcacatttggtccaagtattcctaatttttctaaaacatctatgtcatattgcccatgcaattcttttgctgcttctctatcaaaaggagtctctgatatatgtactgtaaataaagcatcatcatattcttttaccactctccatagcatttcaagcatttcttgagaatttgaccatattgctgcaggagctactcctattttgattcttccattttctgtattatggtgtttttcaaacaatcttcttacatctttttcaaccgtttctacatcttgcattattccaggatgaactccaaattgagctcctgtattcatacatcctcttccaagtattcctcttattcctaattctttataagcatctattattccatcacaaagacctggcttactatgaggatacatgtagtcaaccatggtcgttataccacttctaagtccttcaatacatccaagcattgcagcatcataagtatcttttggctctaaatagttagctgctggaaatgtcatagtttctaaccagtctttaagtaccatatcatctcccaatccttttaataaagtttggaataaatgattatgtgtatttataaaacctgggaataaaactttacctttagcatctataatttttttaacatcagtatatttactttctatctctttagaatttccaatatcagcaatcttgttatcttttactactaatgccccatcaaaaataacttctctctctttattcacagttactattatggcattcttaataagtatatccatcattcttatttccccccgcattatttagtaatttttcttttaatatattgacctgttggatgttctttaacattacaactttgtactacatgatttcctctcaaaaatacatcttcaactttacatttaaccttaaatccttcatatggagtataatctacattttgtttttgagttttataactaattgtttcttctttattgatatttaaaatgactatatctgcatcacttcctacagctatctcaccttttttaggatacattccaaatatttttgcagcattcgtagaagtaacttccacaaacttatttacacttattctattttctaagaccccatatgtatataaaagtgctaacctatgttcaacaccaggtgctccatttggtatcttactaaaatcatcaattcccaagtctttttgccccttaaaattaaatgaacagtggtctgtgccaactgtttgaatatctccactagacaatccttcccaaaggtaatttatgtcttctttttttcttaaaggaggagacattacatacttagcaccctcaaatttattcttattatataaattgtcttctaataatagatactgtgggcatgtttctactatcatatctatatttttttctctagccatttttacagtttcaagtgactccctacaacttaagtggactacataggattttgaattagataatttagttatatcagcaagtcttgaaacagactctttctcaactatgttaggtcttgtaagtggatgatattttggctctaaattaccattttgtatattttcttctatcaatacatctagtaaatccccattttcacaatgaaatccaactatacaacctaaatcccttgctttctttaaaaccctgtatattgttccatcatctactttcatgccatcatatgccatatacatcttaaaagatactatcccatccgaaataagtttttccatatgattaaatgtatctttatttaaacatgtaattgtcatatgaaaaccataatcacaataacaatttccacttgcttttttatgatatgcttctacaccttgcagtaggttttccccctcattggcttctgcaaaatctagtattgtagtagttcctccagctatagctgctcttgttcctgtttcaaaattatctgcagttgtaatagaacctgcattcatatcaaaatgagtatgtgtgtctattccaccaggaattacaattttacctgtagcatcaataaccttatcaccatttatttctaagttatttcctatttcaactatcttttcatcttctatccttaaatcacttatataagtcttatcagaggtaattatagttccacctcttagtattgttcccatatatacctcctaacttttaagctttaaagtattttctaagtatcgtaaaactttatttaaaattgtattttctaaaggtgctatattcagcacctctagactatatttaaataatttattgtgaactaaatattattttccgtatacagattttaatattccatagtaaccttctgttcctataaataactgttcttgctctatatactcatctattgtgtgagcaagattttccttagaaggaccaaatcctatagtttttattccagcttcacctgcatagtgacttccattcgtacagaatgagtattgagttatttctgaatctattccagcttcttttaatcccttatatgctgcttgaacaaattcatcttcttcgtcatataaccaacctgggaagaatctttcactttctatagtatttcctgtatagcaatcagctttttcaaccgcataagaaactttcgcatttaattctgggtcttctttcatcatttcatctaataaagcttgtattggagctaatacgccttctcttgtttctccaactaataatcttctatcaaaagtagctttgcaataatctggcactactgatgcccctggatatggagaagattttatatctgttaaaactaatattccatcacctaaaactggatgagttggaggtactaattgttgtatcttttggattacattagccattttataaactgcatttacacctttttctggattagcagagtgagctggtttaccaaaagtttctactactatttctcctctacctctctgaccaatctttaagtttaactctgaagactcacctattacaacatagtcaggttgaacagccttacttatctctctagccgaaacaccttcaaatatttcttcatgaacaacacctgctacatatagttctccagcaaaatctcgattagtgtctttagcaaaatacgctacagcagacatcattgcagtatattgacctttcatgtcagaagttcctctaccatatatctttccatcaactatttttccttcaaaaggaggaacactccatttacttgcatctggaactggaactgtatctatatgtccatcaaataatattttcttacctggcttgttaccttttatacatcctactatatttccatatctatctcttgaccaactatcaaaacctaatttttcaaaagactcttctattgcttttacaacaccttcttcatttccagaagaactaggattttgaattaatttttggcatatttcagttacttcttgttttctttgttcgtttaacatttcattatccccctagattttttataatgtatgtattttatatacttatatattttctaaattttagaacttatatatcttctaaatatgtaaaccaatatctaataattgcattttagtaattccttatatacttggatattctccatcccaaactatacttctatatttgtcagggtcagtatctccttctgtgcttattaaaagtattcttgaattttcatctaattttaaatcttttcttaaatctgctaaatcttctctttccatagctgctactaaaagaccagttgtaactgctccagattctccagaaattaccttttcatcaccatttaaaggattacctaatgttctcatacctttagcagaaacccagtctggtgctgaaacaaatgctgcagcatgattttttaatacttcaaatcctatagtatttggttctccacaagcaagaccagccattatagttggcatatctcctccaacaaatcttggttttccatctcctgcttctgctgatttatagtagcaatcagcttcatcagcttctactactactgttattgggcattcatcgtatattgaagcaacatatccttgaactgctccagcaagtgaaccaacccctgcttgcacaaatacatgtgttggtctatctactccatattcttttaattgctctatcgcttcttgagccatagttccatatccttgcattatccatgctggaatttcttcatatccatcccatgctgtatcttgaaccattactccatgatcatcagcttctgcataatcattagctaatcttactgcatcatcatagtttaagtctgttatactagcatctgctccttctcctttaattttatttaatctaaactcagaagaaccttttggcattaatacaacagatttttgacctaatttattagctgtccaagcaactcctctaccgtgatttccatctgtagctgtaaagaaagttatttctcctaatttttcttttatttctttcgaagttaatttgtcataccctaactcagatatatctgtatctaatctttgagctaagtatctacccatagaataagaaccacctaatactttaaatgcatttaatccaaatctataagattcatcttttacatatactcctgcaacacctaatttttttgctaaaccttctaggtttgctaatggagtttctttatattgaggaaagcttttgtgaaaatttctaaccttagttatttcttcttcatttaaaaatttgatacaattttccttatcaccctttggcaaattatttactttccatttaatttcttttaacatctaaaatacctccaaattattgttaaatttttatactttaatatataagcaattaacatgccaacactaaatatatactagatatttttctatgactctttagtatagaaattgcaatgcttttattattctttcttttctatctttagttcatacaatgtatgtagaatttaataactaaaaaaccttttctatcttctcactttttaattctcatttttaaaatttaaaaataaatctcaaaacactttgtttctatattttttaatataaaatttataaaatctaaattaaaacataaaatagtgatgcaataatctattacatcactatttgtatatatttaataatataataaatctttagtggtctctaagaggtgatttttcatcttttttaacatctaattcttcttttacgacattccatttttcaagaccaaacttagaaaccataactgcctctgcagcaccttttccaagtctttttactgtgtccatacctgtctcatcctcttgggcaccttttgcttttccatctttactccatattgtaccacctatatagcatccacctaaacctccagatactaacatttcatgcattaggaagaaatttattataggaagttttgtcaattcttggccaccatatctagttccaccagtagttatagctgcaccaaccttattttgaagttttcctggatgaactaaatacattggacgaagtctattaaatactgctgtaagttgagcagttatattcatatcataaactggagaacctactataattccatctgcctccaatattttttgctctaattcttggatatcatcttttataatacacatagtttcttttcttatacatgcatcacaatgtacacaaggacttatttttttccctctaactgaccaatactcagtttctataccaggtatagtttctgcttctttcaaagcttctaacactgcatattctgttgctcctttacgtggacttccacaaatacctaatatctttgccataataatatctcctcaccaaataaatctatttttattatctatttacaaatacaataaattgttgtttgtgctttaatttctactattttaattttattggcaatgaatgtatttctacatcagttgcattatatactgcatttgcaacagctggcgcaactggtacaacagcacattctccaatactcttaccaccaaaaggtccagctttttcataactatttacaaatgcaacttgacattttggcatatctacagttctaaataatttatatgttttaaaatcagtagctttaggtctaccttgttcatcaaatgccaattcttcactcaatgcgtatcctagacccatatgaatcccaccttctaattgaccttctaaatttaaaggatttataactctaccaacatcatgtacagctacaaaatcaactacttttatatccttagtttctttatctactaaaacttcagcaaaatgtacaccataagaagtaagtccagctggtgaagaataatcttcaacaacagttaactctcttaatgatttactttgactatatactgcgacatcagaaagtgatgcttttacattttcatcaagtttactaattacatatccattgtctagatataaatcttcttttgatgtttcaagtaatttttctgcttcttctactataaggtttttcaatttctctgctgtctttttagctcctccaccttctacaaatacccctctacttgcatagtcaccaaggttgaatgtacatgcatccgtatcagtttcaaatgtatcaactttatcaggtgttattcctaaaacttcagctaccatcattgtttgcatagttacgacaccattacccatatcatgtgctcctgttagtagtgtcaatgtaccatcttcatttaatttaagagtcaatgtaacaacatctctatgtgcaccaaaaactccattaccatgtgcacctattgccatacctatacctcttaaatattttccttcttcttttggaagttttttcttttcatcccacttaaacatcttcttaccttgctctatacaatccaatactctaggatttccaagagaaccgcggaagattatatcgacatcatctggctctactgcatttttattttgaaaatcgactaaatccatacctatttccttggctattttcgcaaattgagcctgttgagccataaatatttgaggtgacccatagcctctcatagctcctgctattggtgtatttgtatatacaggcatcccagtaaactttatatttggtattttataaactttaaatactttatgactaagtgctcctataacatttaaagcacttgatgcatatgctcctgtatttgtatatatttttatatcttgtgctattacttcaccatctttatttacaccagtttttaattttacaaaagacccatgacgagttcttgttgatatcatagattcctttcttgtaagaaccattttaactggtcttcttgtcatttttgataatgcggctgctactggttcaattgtaagttctaattttccaccaaatgagcctccaatagcaggtcttataactcttactttatttaatgacatcccaaaaatttgagatagtattattctaaatccaaatgtattttggcaaggtgtatgtacagttaatttatcattataatcatagtgtgcaattacactatgagtctctattgcactatgatgtattgctggagtagagtattcatcttcaaatatatagtcacattccttgaagcctttttctacatctcccccatttatgttgttttgagaaactatatttgaatctccatgtatgcagatagcatcttcttttattgcatcttgtatagtaaatacagctggcaattcttcatattcaacttttataagttttacagctttctctgctatttctggagtctctgcagctactgctgcaacacggtcaccaacaaatctaactgtatctgaaaatataacttcattttcaggtatattgtgctcataaaatcttaatgaaccattgtattttctttgtgatgtattgagataagtagctatagctctaacacctactactttctcagcttcacttgtatctatactttttatttttgcatgtgctacaggacttaaaagcatcttagcgtaaagtacattttgtggtttcatatcagccacgtatttcatttgaccagtaacttttaaagctgcatcttttagagggtatgattttcctattaccttttccataattatctaccccctaatctagctgcagataattttacagcttctataatctttacatatcctgtgcatctacagagattttctttaaaagcttctttaatttcatcttcattaggagatgcatttctatttaaaagagcttgtgttgttataatcataccaggagtacaatatccacattgtacagctccaacttctataaaagcttcttgtattggatgaagattttctccattagcaaaactttctatagtgtatataactttaccttcgcagttttttgcaagaagtttacaagatttcatgtcaactccatctatcaaaactttacatgctccacaactgccactattacaaccttgtttcgctccagttagatttaatttttcacgaagtacatgcaaaagagtttcattcttttcaacttctatttcatacatgtaatcattaatatttaattttattttttccattttctcctcctacagataaactaatgttgtaatagaatattattacaatcttattttaatattagtataagctattccacttatgtccttccattctattagttacattagctctcttacataattcttctgctgcaagttgtgcattaagcaacacttgttcttcactttcaattgtagttacttttccattttcaagtattacatttccatcaactaaaacactctctacattgtgcatactagctgagtataccaaagttgatacaggattgtgaagaggtattgattttggagaaagcattgagttaaatattactaggtcagcttttttcccaatctccaaagaacctatttcatcttccattctaagagttcttgctccctcaattgtagccatttcaagaactttctctgcagaaattgccagagggtcacaattatttactttgtgttgtaaagctgttaatttcataagctctaccatatcttgtgcgttattacttgctgcaccgtcaagacctaaactcacatttatacctttttttaacatttctggcacaggtgcaacaccagaagcaagatacatattacttgctacattatgagaaacttttatgtcatactttttaagcatttccatgtcttcatcagttatacatacacaatgtactgctacaacttctggacctactataccccatttttcaagtaattttatatctatttctccatgtatatcctttgttgctgttcttgcaaattctgtttcagatatatgaactgtaaaatatgaatcatattctttaactatattccaaagcatcttacccatttcttcagatatagcccacattgaagaaggagctacacagatttttattcttccattttctgaattatgatatttttcgaatacccttctcaaatctttttcaaccgtttccacatcttctataagctctttgtgaatacctaaatctatacaacctctacctacaacccctcttatacctaaatctttatatgcctttactattccatctgtaagtcctggtctattgtgagtatgcatataatcaaccattgtagttataccactttttaaaccttccatacatccaagcattgcagcatcataagtatcttgttctgttaagaattttgctgatggaaacatcattgtatttaaccactcatgaagtgccatatcatcacctaaaccttttaataacacttggaacaggtgattatgagtatttataaagccagggaatattacttttccattagcatctataacttttttagcatcaagatacttaggctcaatatcaactgtatttcctatatccaagattctgtcaccttgaatagctattgctccatcaaatataacatctctgtctttattaactgtaacaattattgcattttttattagtatatcaatcatcttaaatccccctttgaatactttcattacaacattttaccatatggttttctcatattatatctaatacatttatccaatattttcctcaagatttgaagtaacgttttcagcacttttacgtgactttaatttaaataatgtttgaagtaatatagctattattgctccagaaactatacttgaccctccaaggacagttccaattgtttctgggaattggtctaaaacttgtggagcagttgtaagacccatacttgttgctatagatacacctgctataagattgttttcttcagtgaatccatccatactcataatagagaaaccagacattgctattgatgagaaaactactaaagttgctccaccaacaacacaagatggtatagttgtcattattgcacccaatgctggagatatccctgctagtaataatacaagtgcccctagtgctattacaaatctacttgtaactttgttcatagatacaattactgtattttggctaaatactccagttggaagagctgcaaatagtgatgaaattatagaagttatagaatttcctaaaacaactgatgctaattcttcgtcagttacctctctatccattgctcctactgtagctattgtacaggcacccatcatatcagctatacctattatgtaaataatagtaaacattactattaactctggtctaaattctaatccaaaagctgctggtgttggtaaagatactatagctgctccttgaacggctgagaaatcaaccaatcctaaaactaaagatatagcataacctactaatattcctattaatattgaagaattttttactaaacctttaccgtatttatttatcattattattacaaaagcaactataactcctactgtgaagtttattgggcttccaaatgtttgtgtgccttctcctccagctaaattctttatagctgttgcgaatagtccaagtcccatacatgctattatagttccagaaactattggagtgaatatatgtctaattttcttaactccaaatcctacaaagaatacgattaccccagcagcaatctgtgctccaaatagagctgctaaaccatctttagctgctactgaaagacaagctcctaaaaatacataactcattcccatcattacaggtaatcttgaacctaacttaaatcctttaaataaaggtattggatataactgtaaaaacgttgctaaacctgctgctaacatagaaccctgaatcaacattgttgcttgcccctggttaagtcctaccacgtttgctattaatatcgcaggtaccatatttcctactatcattgctaacagatgttgtaaggccaaaggtattgattcctttagtggtggtatcccatcgacatcatattttgaagtattacgtgttttcataaaataaatcctcccatacataaatatcttgactaaatatttttataattattttctataaatatttttatgaccatgaatttattgctcaaccgataaacacagctaaactgagctatttttataaaaaattaacaaatttctaaatattccctccccgattttcaacttaaatgaaacattaattgcctggtatatatttatttgttaaattttttattaaaatgaatagctatcaaaaataatctaacaatctcatactaaataatttaaacaattcttttaaattattatatcttaattagtctcttccataacagctctttctttagcctcatcctctagacttttatttggtattattagatttaaaacgaatgcaaccaatgttgcaattactattggagattctccaaatactaactttacaaatgaaggaaatgcctcttgggctgctggtactgatgttattcccatgcctaaggcaattgccaaaccaacaatggtaatatttcttgatgacaactcttctgtaataattaactttatacctgtcattgttatcatactaaatatagatattgtagctcctcctaaaacagaatatggtatagtagtcattaatgcaccaaatttaggcacaaaccccgacaataacataaatataccagctattccaagcacaaatctacttattactttgttcatagctaccatccccacgttttggctatatgatgatggtggtaaacctccaaacaaagctcctatcatagtacaaattccacttcctattactccacttgataattccttatctgtgatattcctatccatgcctcccattgtagtagctgataaatctccaattgcttgaacagcattgattatacttacaattactactgagattattacaggcatatcaaattccatcccaaattcaagcggtttaggtatcgcaaaccaagttgcctctctaatagggtcaaaatttattatacccagaactaaagatacacaatatccaactataattcccaaaaatattgctgccaattttgcatatccttttgcaaattgactaagacctataactaccactaatgttatagccgctactgcccagttttgcatagaggcataagtaggactatttacaccacctgccatataatttattgctataggatacaaagataatccaattgtaaaaaccactgttcctgcaactatattcggaaaaaattttcttatcttttttatgaatatccctattaatactgtagccactccccctattaattgtgcacccaaaatgcttgctaatccataatttcctccgactgctacaagtgttggtacataagtaaaaccaactccaaaaattataggcaatcttgaaccaatatttcctattggatatagttgtataagtgttgatataccagctattattaatgcatattgcactaaaagtgttatttgtgtagggctaacacccacagctcctcctacgactataggtactgtaacagttccaactatcattgctagtatatgttgcattgatagtggcaaacactttaaaattggtggccttccatcaatatcaaacatagaaacattcttttgatatttactcaaggttatcactcccaactattttttaatgacagttattattatctcacacaacatcctttctttttttattttgtcatctcaatttaatatgaagcaattataatgccaattttttaacataattgttttacatatataatttttattatatttgttagtatttgataatttattaaagcatttatttttttaaattcttttaaattttttttatttttggataataaaatgctattacacaaaaaaacacttagaaaatagttttccaagtgttttttatcaattttataatttcaaattttagaattgagaataaaaaacctaattattatacatctatttttctgtacaatgtagctagtgatattccaagttttttggcagccagttttttagacttagtatcatttccgtaaaactttaacactttctttatataggctctttcaaactcttcaagtgtaagtatgtcttgttccatacttatctcatagtcactttcctcaagtaactttatatttatattatttaacttaaaatattcaagtatctttctatttattattcctttatgtattattccatcttcctcaagaaggtttaatgccagttctatagtattttccaactctctaatatttcctggccaaggatacttaagcaacatttgttccacatctggttctatatggtacacgtttttcttcatttttctcgaatatttgtctataaaattatttattaatatttgtatatcgtctcctctttctctaagtggaggcacttctaaaggtattacattcaatctatagtataagtcttctctaaatttattttccttaaccaactcaaataaatctctattagtagctgatatgattctaacatctatatcaattagttcatttgaacctattctcgtaaacttcttttcctgtaataccctcaataactttgattgtagttgaattggcatatctcctatctcatctaaaaatacaacccctccattggccaattcaaacttaccaattttaccttttgaatctgctccactaaaagctccttttgtatatccaaaaagttcactttctagtaaaggttctggtatagcagcacagtttatagcaacgaatgttttattccctctgtttcctgcgagatgaatggctcttgctattaattcttttccagtgccactttctccagttatagctacagtagaatcactatttccaattttgcaaattctattcttaagagcacgcattacatcagactctccaattatggagtctactgttgttgttccccaaatattatatacttccattccaccatacattactgaatcactgtgtttgtccataaaatatcaactccaaataagtattctatataataatcattcacattatctatttaattatatcataacagaaaagcttagttataatttaataatattattttaaaacaaaacttaataaaaagtatatctacttagttttaatttgatagatatactttcttcattttacaaaaatcctctattaaataagcaattacaatgccatattttatatgaaaataatttttaaaatttttaatttaagttcttattaaattttttatactactcgtaatttttatacctatataaaattacttttataaattttaaaattcttatttttaaaatttataattaaaaattatcttttttaaatcattttttgtgttttttatatcatctaacctcacagtttttgcttctataaacttacccttaaatgattctgataatttccaggaactataattcttatctttttgaatacaaggatataataatatacatctttttgcattttcatatgctgttatatatgcatacatctggtatatatcacttgacctataaaaaacatttgaatctacttcaatagctttccatttagtgtcaattataatttcatattcattttttaagtcatataaaactatatccggtcttaaattaaagtttttcttacctgtttgttcatttttcaaaagaaatttactcttatcttgtatatatgtttctctaaatgaattgtcccatatacttttgattaaaattcctatatattcttcatacaaagtatttatttcaaataatatagaaaatgcctcttgattattttgactattatccatagatagatttaaaagtagaagtctagctagtaaataacaatctttaaatctatcattgtttttataaaatttataacccaacagtttttttctatctatataaattaaatctacattttgaaaatagcttaaaatttttttaatcttgccttgaattgaattgtcatttattctacataaaatagatatacatgcttttttaagaacttgattcaagaaattattttcactacactcatcatattcacatcttattttcattggagaaatgcctttttcttttgcatatgtacttaataatattttacccctcataacatttaagttctctattttatttatatattcaaaataaataccttttttcatctgtgtttgcatactctcaatgaaatacataacaaaaaaatttaagagattataatttttcaaactcaatcttattttttcattcattgtaattggaattttattacatatagaaagcatctgtaatagtatctctctatcttttacaagattatcacttaatgacaatttaggaagtatttcaagtattacattttcaaaacatatgatgcctacatagtttataaatctaatttttttgtatttaatatctattatattactttttaatacatcattattgttctctagatatttaagcaatttttcatattcaatttctgtaagctcattttcaccattacctacccttatccattcataggtttccttaacatatatatttttactcatatatattttttagctcctcactagatatgttttgttttatacaatagttaactttactctccattattgaggcattattatttttaaataactcagaagctataagtttttctttataaacaatgtatttatctttttcatttcttccaattcctcctaaaatcaaacctactttttctgaatcataataaaaatactcttgaagaagtggtattattttacttctaaatactactactatatcattaatattttctacagcaagtagataagcttgtccaataacatggtctctatcatataaaaactctatccttttattgattgtatatagcatttttctaatatctataccatctacaatagacaataaatcataatctggcataatttcttcaaaattaaaccttcttcttaaagctatatctaaaagtgctattgatttatctgatgtgttcatagttccaactatatacaaatttggaggtagagaaaatttttcctttgaatatggtagtttgacaatagtttgatttgatttagtaagtcttttatcatcttccaataatgttattagctcaccaaatattttagatacattccctctattaatttcatctattattaaaacatagttttctgattcttcaaaattaaaactctcactatattctatattttctaatactaatttctttttcctgtcttttatagtttctaaagtcaagctatctttttccaactcaaagctcatctttttttcaaatttcaatgcattataacatgcttctatagatatatcctttaatatcccatcttctggcttaaaattgccttcaccatcagacttaagaccctctataaattcctcatatccatatgattgatgaaatgtacaaaattctacattgtttttataatctaagtaacctgtatagtatttgtttcttagactggtttcacttactagattgtaaaccatctgttttgtattgtatgttttaccagttcctggtggtccataaagtatagtatttaatggcattttattagtaaatctttttacatacttttcaactatactattattttcaaatataacccatgcatttccgtctatattctcctttccatactctatccatctaacaggaaaaaaatatccaccatccaaagcacttactttctctttatcgaacccttccataacttgacatacgccaaatagactcttcattgtatggtcattttcacaaattactttctcgctattatacaataaaatataatcatctgtctttatattttttaggctttctaattgttctagattaatgggctgaataaataattcttcatcatctacacacttatctacatttttataataatagttttttaaataccatttattattttcactttcttctattctttttctcaataatttcttatcttgtgacttaataatttctaaatatgaactaatatcattattatttaatttataaaattcacttgtatatactttacaatttgaaactgtatcaaaattatgcatccattttactggtagtgtatgccctaaaatatgacttaattcatatccattttcaaaatcttcttcaactatgccaatagacacattacatttaactttttcttctatattttgatatgctttatataaaaaataatctccttttttaatcgacataaacttttttataaaatctttatcattacaattctcattaatatacttttctgattttttccccatactgaatactttttttaaatttatttttatatcaaatccaagtgcaattatgctttcttctataaaaatctgtggtgtgtctgtttcctgataaaaaaattcttccattaaccaatactctgtacctcttatattttcagacatatacactctccttaatatctaaaatatactaattatacaataagcctactctaatatttccatttaaattttcctttatatataaagaaaatattacttcatagctttcttctaccttgctctgaatattacttattaaatcattcaattccattatagaaaattctggacttccttcaacaaatacaattcctttcttacttataaattcctcaccaatatattccatcctgtcaaataaaatgtcagctatctcgctatatgactttgtatcttcaaactcttcaaaagaatacttaattcctttatctcctacaatagcttcttttaaatcagtaatatctatatttatcatgcaagaatcagaaatagactctaccatgatattcattaaatcaacaaatttaaatatactatcattattgattttaaactctctcccaagctctaaatcttctttattttctttctctgaacaatccattcctatagatagaactcttctttcgtttgacatatatgaaacagcttttataatatctctaatatgtttatcttcagatgaatatatcaaaaataatatatctacaccatctaaaagacttctaacatattctttttcaatctcttgatttatgtttattttttctatatccatatttgcttttattttttcttctacttcatttattatattaataccttcaactccaataccaattattttagcattcttattaaaattttccattataacgtatatctccttaataattatttaatttcaacatttctaaatattataccatattttcttcataaaaatatcttaactcattggccttatcataaagtagcttattcaaaaattttggctctataaccttagcattatttccaataaaaaataaaatcgaagcataacaatctatatcttcaacctttatgaatgtactaattattccactaccatcttcatttagctccatatctaaattccaagaactgtcctttattttagaaacaccttctttagttaataatacatttagataaataatttcaccaaattttttagtagttgaactatttccatataaattgttatatacttcatgtaaccattcttccaagtttatatgtatttttttactttctcctgttctttttatatcaattatattatctatatgaactaatattattttatcacttttacaatcatatgctggtgaaaaccatgctcccttatttaaatatatacctatagggcatacgtttttttccaaaatctgattaccacacttatacttaatatttaaaattagagattctgaagaagctctaaaaaactcagttacattactactcttaaaatctccatcattagtatcattagctacaaagccaatgtatcttttaatattttctatacctacttttatactgcttttacgttcataacttacttttctcattatagaattaatttctatttccattaacttataattataaatctgaagtgacttaagtgcaaatagtataatcataacttctttttctgtaaatataacaggaggtatatagctattatttagcaccctataacctccatttctaccttgttctgcttgaattggaagtcccattttatttaattcttttaaatatcgttgtattgttttagctgaaagattaaattcctctgacaactcttttattgtaaacttttgcttatcattaatatatatccaaacatcagtcaatctttttaccttcgacaaataaacacctcttttcactaataatactctcaattaattaaattactatacactatttaaaatttaatattaatgacatttttatattttttcattaaaaagcagaaaaatggtactcctacaattgttactactacaaattctccaaaacctacctgtatcatagatagaattaatggaagcccaaagaatacatttaacattagaccaaccacaatcgaatttataacagttggccataaagaagctataactaaagtacttttattttgtttacctaactttctagtaatataaatcatacttgcacttataaatgtggctaatgttccagaaattatatcaggtacaccatatggtcctattacatttgctaaaaaacaacctaatgtaagacctactatatatcctttatctaaaaatgccaaaagcatcataatctctgctaccctaaattgtattggtccataacttataaatcccaatgataatgttaaaactgcatagattgctgtaattgctgcagttagtgctatattaatactattttttctcatatctgtctcctagtaaaagttttatttctaaaaaaattaataacataactttattttatacaaaatctataaacttaaacagtaattttataaaaacaaattattttagcgaactattttccaaattcattttatattatacaatataatacatacaaattcaattttatatatatagaatatatgatattaaaattatatacaaactaaagataaattttctattgttaattaaaaacagcaaaaaagagccttaaaattaggctctaataatttattttaaaatcagtgaactctactaccatcttttaatttagataatatcatccaagtacctatacaatcaatttccagttgtttctctatttcatcatataacatttcttgatatgatgtatttaaaacaacattttcaaccaatttagaaatttcctcttctgcaaaatcaatttctatttgattttgtttttctttaaaaaatacccttacttttctctgacttattgaacgaccctcaaagctgactaaacattctaaaatgttcttatctcctctaaaattatttactgctctcatattatttagattaccagccaaaacatcatccccttatttaattttgtattttataagtaaaattcataatattataataactacttattaaatatctttcaacaggtatgacataactggttgtttaacatgtaaaactagtctaaattttcataaataattatttattcatttccataaaaactttttcaggtgtaatagggagtgtatttattcttacaccaattccattaaacacagcttcttgtattgctggtaaaggtgtatttataacaacttctccaacagatttagcaccaaatggtccagttggttcataagtttcaacaaaatctactttaacatttccaatatcacatctagctggaatcttgtattgcataaatgtatttgtgtccatgcttcctttttctgtgtatctaacttcttcaaataatgccattccaatcccttgaacaattccaccttcaacttgtatcttagctagatttttatttataaccgttccacaatctactacagctacataatttactaaatcaacttttccagtttctgtgtcaatttcagtttctgcaaaacctgctataaaaggtggaggagatactgggctaccatgagaagcaagacctattaattgattagtatctggaccaattgtagaatcaactgctatatcgaataataaagtgctaccttttttactagttaattttataccatcaaattctacttcatccttctcaacacctagtttagttgctccagcagaaattattttttctcttaagtcttgagctgccttaactactgccatacctgttacataagtagtacttgaagcatatgaacctgggtcatatggaactaagtcagtatcagctgatataactgttatattttcaatgcttgtatcaagaacctcagcagccatttgagctaaaatcgtatcacttcctgtacccatatcagtagaacctatcataagagtataatctccacagtcattcaattttatttcagctgaagacttatcaagaccttgtataccagaaccttgcatagtaattgccatacccacacttctaatttttccattatcaagatgtttacaaggatatttttcattccatccaataagttctttgcctttatttatacattttattaaatcgacactatttaaagttttaccatatgcaaatgtagtttcaccttctgttaccacattttttaaccttaaatctgttgggtccatttttaatttattagcaagcatatttatagttgattcaacagcaaaacatccttgtgatgctccataccctctaagtgctcctgctggcatcttattagtatataccacatctgcaataaatcttgttgcttcaactttattatacattggtaaagttttttctccaaccaaaccaatagttgtagaagcatgctctccatatgctcctgtatcagaaagtgcttttatatctattgcctttattatgccatcatttgtagcacctagtctaacttttaatctcattgcatgtctacttgttgaacaattaaaagtttcttttctatcataaattattttagctggtttccctgtttttaaagtaacaattgcagaaaaaatctcaacacacgcagtttgtttaccaccaaatccgccaccaattctaggttttataaccctaattttgctagctggtatttctagtgcacgagataaatgtctttttacatgaaatggtatttgagttgaacttactacaaccaatcttcccatatggtctaaataattgtatgccctatacgtctccatcattgcatgtgcttgagcttgagtataataagtttcttcaatcactacatcacaattacttaatactttttctacatcaccttttgtataatcatgatgggatactatatttttttctctttgcatacctatatcaaagttacaatgtctatcttcatcatgtaccatagttttatttcctattgcctcttcaaaatccaaaacaggtgtaagtacttcatactttactttgataagattcattgctttaattgcagttttttcatctatagctgccactatagctacttcgtcacctacatatcttacaacatcttcaagaattaatctatcatatggagatggctctggatatgtttgaccagcaagtgtaaatcgagattttggtacatctttatatgttaaaacacattcaacaccatcaaccatttctgcctttgatgtatctatatcttttatttttgcataagcgtgaggacttctaagtatctttaccaccaaagcattttttgctgataaatcatctgtatatacaggctttcctgttgtgatactcattccatctattttcttgattccttttccaactatattcatgttctattttacctccagataagttttgatagctcttaactgtcccatataccctgtacatctacatagatttcctgtaagataatgctttatttcatcatctgtaggattttcaagctcatccttcattgcaagtacagtaagtataaagccaggagaacagaaaccacattgctcagctccttcttttaccaaaacttcactaaattctttaacttcattttctaaaccttcaattgtagttatttctttatctaaagctctcaatgtcagtgttgcacaggataatgtaggtttcttgtcaattaaaactgtacataaaccacaacagcctgtgtcacaacctcttttcacacttaaattaccaacttttcttaaagtatcaaccagatattcttctggttctatatcaacactttttttcttcccatttatattaatctttactaacattaaataacctccattatagctctttttaaaagtactttactcatagcttttctatactccctagatgctctcatgttagaaccaaaagttagttcttctgatgctatttctactgctttatctatattaatttcattgatttcattgttagatagaaattcactagcttgttttgcaatcgtagctttctgcggtcttgctcctacacataacttaaattgttccatatgttttgatacagatacatttagaattggataatcactctttgcatttctaagtgatttataagaagcattcttatttgtcttctttatgtatatcttaataagtaaatctttctcataatctctatttagaaactcttcaagactaattctcccaatattatataattctacttccgtatctaatgaaagtaatgctactatcaagtcagaaaaaccatatttagaaaatactgttgcaccaactgttactacatttctaaactgaactcctattatatttttaactgaatcttctattattcttccaaaattattttttattatggaacttgtttctaatgttctaaaagtagtcatagaaccaatctcaacgtaatcttcatactcttttatataatctaaatttaatttagataattctattcctgttcctattctttttttccccattcttaaaaaagcacttccaccaattacttggttagtttttcttttatttaaaattgagtacgcttcttctactgtatctggctgtacaatatccataaccgtaaacataaatttcctcccttatttgctattcttattttaaatacaactaattatatcatagcttcaacaaattttgataataaatatgtctaatatgtaaattctgtaaattacttatacataaaaaaatgactatttcaataatcatcattagacaatattaaaatagccattaacaggtactattttaaagcaaaactttaaaaagttgatactttttcacttatatttatcacttcttcttctaataatccaagttttttagctactaattttgtagtacttccttgtattactaatgtaattaatatagtcataaatactacagatgaaatcacttcgtatccaggaactttcattgctgaaataataccacaaagtgctgctggtattacgcctgtttcccttacccacatcataaataatatttcacttttactccattttgcttccctgtctacaagtgtacaaactaaaacgcaaagtggtcttgctataaacattaatactaatactgtaattacagatggcataaaatatttacttaactgagccaaattaacttggctacccaatattataaatattgccatacgacaaatagtacctaaagtttcagcaacataaaaatctgcatcataagatttttgacttaaccaaattttaaagtttttcttgttaccagttattatacctacaataaagcaagacatatatccacttccacctaattttgtagataattcatatgcaactacaactgaaataacagatattattggtgcaaaatctttaaatattccataaggtttatcattaactaatttcaaaagcagtattcctgtaattaaaccaactaaaactccgacaataaccattgtccccagttcataaatattttcacctaatgaaaatttatttgacaaaattacagccaacactgctgatgttagtatagctcctgttgcatcattaaaagctgattcacttattacagtttgttttaccctatcctttatctttacctgattaaatataggtacaagagtggctgggtctgttgatgctattatagttcctgctagtaaagcagtcattgcacttatcccaaaagtaaatcctattacttgttgcattataaaagcagatatcacaactcctaaagtagctaataagaatacagatatcttcacatttctcaatacttttaaacttatttcttttccacctaaatataaaataaatgcagaaccaaatgtaagtattagttgattttctatttgaaatccacgaatatctataaattttaaaaatgatggtcctattaaaatacctacaagtaaatataacactacatctggaacctttattatttcactaagcttactacaaattattccagttatacttacaatagcaaaaattatcaataaattattgctggcaattgtgtgtatagatgcttccatgtccgtctctcctcccgatttgcatacattatgcaatatacttattgttttactatataattatagcacacaaataaatgttatcaatcattttttttaggacatgcaatttagctttcatttttgataattaaataacgcttatataattttgctattttttgctagttattaaaaggttgattttgtcaagtttatagtatatatatattaatattttttatatccatatctttttagatatttttcgactttttcctccattaaaataagtttaaatttaacaataaaacatttcattatatatattttttaaaatgtaccattttcaacattttcattaacttggtctattcatttttttcttatctattctatatccaagcatattccctatatttttacttacatgtaattcttgagctatttcaagtttattatcattgctttgttttatcttagaaatctcactttgtttttcattttgtttatcttgtttcatagtttctcctttcaaaacaatatcactttttctgtttattacttattatttcaaatttctataattttaatcaaaaaagggaaatatctcaatataatatagcttactcaacaccatatttatatatagaatttccctaattattttattaatttaatttttcaataaccttatctaaattagaatttactttatcttcctttttccaagaatttaatgtataatgcgttccaaatgtaaataaacctgaaactattaatataaaatagtatacaaacccactatataagagtacagagtaccccaataattcttttggaattatattggagaacatagtaaaaaatgtaacctcattagctccaacatttcctggtgttggaattggtgatatagccatatataaaaagacctgtaatgtcattatatgtacatatgaaactcctcttaaatttgaggctttatacacacaataaactatactgaaatatgcgattaattgtaacacagtaagtaatatacttaaaactaagattcttacatttttaataaatatttttatagaataattataatcatcaatataatgatttattctatcacgttttgaatctaaaaatttaaatgttttaaatttagataaaaaattaatcaaaacttctgctatcatttttacttgttttggactaaatactattaatagtccacctaacaacatacttacattcataatcattccaaaagttatcaagactttcacagaatgtacttgctccatcagtaatgacttatttagcaaaattaaaattccacaaaatacagtaactgtactttgaaatactacagttttattagtaactatagccactgatttactaaggcttacatcatattttgtaagtgcatatatttgcattggttgactcccagatgcaaatggagtaactaagttatagtaaaatcccattgtagccattttaataccaataaattttacttttgttttttgaactgcatttattatcaaatgagttacaatagattcaattatcatatatactataattgtcaatatgccaagaaatatataagtcttatttactagccttataattttaggtattagttttatatctaaagtagttaatactaaataagtagtaatacatatcaaaaataataaaaatccatattgaataaaatctttttctcttttggataattttctcatttattttctcctaaattttttcatatcactatacatagtatactacttaacctattatttgcaagactaaaaaagataagtctttatttgacataaatacacctataaatttttaaatattcttactcctttagtagaaataattctccatatcataaaatctaatataaaagtaagtatacttgccaaaataatatatatatttaaaaacgaaattccaagtaatacatatatacctccaagtataattacgtaagctaatgatactaacattgtaattatcatacttgcacttctttttactacagccatctcatttttccaatcaaggtttggatataataaatttgataataatcccatcaatgccacaaacattgaaaaacttgcaatcaaacagattgatacaataataaactgaatttcaaaacctaatcttatagatactaatattaaacataaaatagataatggtgcattcaataaaaaattcatcaatatttttgaccagaatatttctctttcatctattggagaagatttcagtatccataaattttttccttcaagagaaattgaacagtatgttgtacaattcattactattataaagaagaatactcccaataattgtatttttataaaattaaaatctatattcaatttcagtaactcacccactttatctgctccaaataataatattaaaattgtacctattattaggaataacaaacctgcagatgaatttaaaaagtatataaatgaagaagtatatctcttaaattctttttttaatagagcttttgaaggtcttgaagttttttggctcttaaatttataagtttttgacttatatccttcactcatcttagcatttatatctttaaatttttttgcaaataatgttacaaacataaaaaatggtattattgaaattgctataaatgctaaaaaggaaactacacttcctgttttaagagcgtcaacaaaataatatataggtggatatatttttctaatcgtctctgaaatagatacactattctttaacatctcaaccgacatagagttaagtcttgtcataagtagagtataaagcaacatcaatataatactacctataattaatattaaatttttgtattttattcttgatgatatctgtcctataaacataaaaattattgatgaagcaactattggtaataatggtaaagctaaaaatagcagtatcaaataagggaaatacgttatacttacatcagaattaaaaaaataaaccactgctggtataatcatacatattgaagaaaataaatagtttgctccaaccaacattaatatcttacttgctagtacagtagattcttttataggtaaactagtcaaaaggtctaaatcttttgcttgaaacagatatgatgacgttttatataatgatgtaacaatagttgttaatgttgataatccaaatccaaatataagtagcatttccatctgatttatttgctttaaaatatcaactaaagaaagacttatactagttacataaaaaatcaataaccctgttataataacaactgaaagtatcatccccattattttttgtttttctctactatcagctttttttaacgcatttaatttaaattcatttattatattagtttttattaatatacttagattgctcatattttatcattcctcactttagacactatattgtataaaaaacattttatttctctattaattccataaagatactttcaagtgaattacttcccttaacttcttctgtagttccataagcaattatatttccatcttttattatggcaatcttatcacaaattttttcagcaacttctaaaacgtgtgttgagaaaaatatacaaccacctttgtcacaaaactccctcataatttccttcaatataaaggaagcttttgggtcaagacctacaaaaggttcatcaagaattaagatttttgggctgtgtatcaaagccgaaattatagctaatttttgtttcataccatgcgaatatgaagatattaaatctcctaatgctttattgagttcaaacttatttgaataatattttattaactcttctcttttgtctttggcaacttcaaatatgtcagctataaaattaaggtattgtatacccgttaatgactcgtataaatctggattatcaggtatatatgccatttcctttttacattcaacaggctgtttttttatagatttagaatttattagtacttctccctcttcaaaatcgtgtattccaacaattgctttaatagtagtagttttacctgctccattatgtcctataaacccaaaaagctctccatcatttacatcaaatgagacactacttactacttttttatttttatatgatttagatacattgattacttttaacataatttccctccatattatagttttgatatttgttatatataatatataacaaatatcaaacaattacaacttttatttgtttattttagaaatctataaaatgcaaaggtatcagaaatataaaggtataaatataattgatatttactttcaaattacacataattataaaagaatatatagttcgatttgaataaacaatgtataataaaaaatagttgactataattattaaatataaggagcaaaatatgaatacatttgaacaattaaaaataagttccactctaatagatggacttaaaaaacaagacataacttctccaacagaagttcagtcacttgttatagggaatataattcaaaataaggatttattgattaattcacagactggaacaggaaaaacactagcgtaccttttacctatatttgaaaaaattgatacatcaaaaagagaaacacaagctcttatacttgcacctacgcatgaattagtaatgcagattacaaaccaggttgaattattggctaaaaatgcagaactctccgttacttctttagctttaattggggaggtcaatatacaaaaacaaataaaaaatataaaagcagtaaaaccacacatagtaattggctcttgtggaagagttttagacttgataaaacaaaagaagctaaaatcacataatataaaaactatagtcttagatgaagtggacaatctattgaatggaaaaaatataacttgtatagaagacataataagaacaacgttaagagatagacaaattataggatgctctgcaagtcttactgatagcactataaaaatttgtgataaacttatgaaggagtttgaaataataaaaacaaaggaaaaatcacaaataaatcctaacatcaatcactcatatttattaggtgagataagggataaatttacttttcttagaaaggcattagcagctacaaatccaaaaaaagctattgtatttgtaaataatgaaaaaaatatagaagtcctagtatcaaaactaaattatcataattacaaagcaataggaatttttggaaatatggaaaaagaagatagaaagaatgcaataaataaatttaaacttggtaaagcaaagattttaattacaactgatttatctgctcgtggactagatattgtggatgtaagtcatgtttttaacttggattttccaaaaagtaaaaatgaatacctgcatagatgtggtcgaacttctagaggaaatcgaagtggtaacacaatctcaataataacaaaaaaagaattagatattataaaagatttgcaaaaagagttcagtatagtaattacacctaaaactttacaaaatggagaactaatagacattattaaataatacaataaatacgaaaatacaacaaatacaaaagagctgtagtttatcatcacaattgataataaattatagccctttattttatattaaattaaaattttaaataatacctattataatagccaaagttttattataaataatattgccagaacaatcattactacagaaacatgttttttgtcttctgcctttttagctccaaatatattataaaatatatttacgaaaacataagttaatatacctaaagttaaaccatcacctatactatatgttaatgccatacaagcaatagtaacaaaagctggaacaccttcagttatattatcaaactctatatccttaactgtaccaagcattaaatatccaacatatattaaagctggtgctgtagcacatgatggaattgctataaatacaggagagaaaaacattgcagctaagaataaaattccaactgttattgctgtccatccagttcttccacctgcgataactcctgttgaactctcaacataagttgtaactgtagatactccaagtcctgcaccaactgtagttgcaaccgcatctgtaagtaaggctctacctacattaggaacattccctttttcatctaacatgtttgctttagaacaaacaccaactaatgtacctactgtatcaaaaaaatcaacaaataaaaatgtacaaactactactaaaaaaccacctatatttgttggatgtagtacatatcctaaatctattttacctgctattggtgctaaactttcgaatttaaataatccaccaggtaaatatatacctaatttttgtgcatactctggattcataaaagcaaatgcccaagcaagtaatgaactcactactattccaaaaagtatagaacctttaactctttttttatctaatacagcaataattattaatcctaaacaagttattattactgctggtgtaaatctacccattttgataagagtggcttggtctccaataacaattccactgttaactagacctataagtgcaataaatattcctataccacctgtaacagctaatttcatattttttggtatcgcatttacaacagcctcacgaactccacttactgataatactataaaaataataccttctacaaatactgctgtaagagctacttcccaaggaacacccatttgtaaaactactgtatatgcaaaaaatgcattaagacccatacctgatgctaaagcaaaaggaaggttagcaactacacccattaaaatacatccaaatgctgctgctaaacaagtacctgtaacaagtgcacctgcaggcatgcctgtctcagataaaatatttggatttacagctattatataagccatagttaaaaaagtagttactcctgcaattatttccttcttcatgtcgacatttttattagtcaaaattggaaaaagtttctgcatagtactactgtttgttgtttgcataacaacacctcctattaaattttacaaaaaaacgacacagtagttgataagctgagccgtatccttcataattcagttaattaaatatttaattaactaaataatagtatacatagtcagaatatttacggtattccggtagaaacttatgacccatattgtcaaaattatatgttatacagtacaaaacatgaatttttctttacgaatattattttaatttatataattaattttgtcaatatatacgtatatattgtattgattttgtattaatattcgattatattaaatattgatttattaaattcaaattataattatattctttacattttaaaaaaatatatgatattttgatacaatttatttatagtttggatataaagtttatgttaagattatactataataaattaataatttttttatttggaggaataaggtgaaagatttaactacaggtcatgagggaaaatccatattcttttttgccatgcctatgcttattggtagtttatttcaacaactatacaatacagctgacagtataatagttggtagatttatcggaaaagaagcaatggcggcagtctctggagctaaccctataatgtttttattggtggcagcgcttatgggtgttagccttggattttctattttagtgtcacaattttatggctcaggagatttaaaaaaggtaaaagctactattgatactacatatatacttttatttattggttctatattaataagtattcttggaatagtatttggtggcccaatgcttaagcttatgaatacaccagaatccgtttttgctcaatcaaaattgtatcttactataatatttagtggaatattattttctgctggatataattcagtaagtgcaatacttagaggacttggagattcagtaactccactttattttctgataatagccacaattctaaatatagttttagacttaacttttattgtagtgctaagaatgggtgttgagggcgttgcacttgccactataatggctcaggcagtatcatttataataagtataatttatttaaataaaaaacatgaagtgcttaaatttaaaatcaaaggaattgtatacgataacaaaatatttaaagatggacttagattaggacttccaagtggaattcaacaaatgttgttttcaattggaaatatgactcttcaatttttagttaatagttatggtacatctgctatggcagcttttggtgctggtcttaggatagaaaattttataagcttacctattatgaatcttggttctgctgtttctacttttgttgctcaaaacataggtgctggagaaaatgaaagggttaaaaaaggcattcgagaatctataaaaatgaccttagttttagcagttacagttattgctttaattttgctatttagggaaaatctaattgctctattcaatactgataaagatgtcattaaaattggctcttcttacttatttataataggaccattctttttatttattggaacttcttttgtactttcaagtgcaatgaaaggtgctggtgattccatgtttgcacttataagctcaatagtatctttatggcttggaagacttccagcttcttatatgctttctaaattttttggaacagacggaatttggatgggtattccttttggttggactttaggtcttattgttacagttatctactataagaaagggtattggaaaactaaagctattgtaaatcatagaatcaatgaataatctttttataaaatgtattcacattcattgtattcacctccattatgatataataaattatggaggtgaatataaaaatgggtattattcttaagccaaaacaattttatatgactgttatagttaccataattctctacttctctcttaattacagtttcaacataaaattttctatatgcttatcttttttaactatcttgatatgggctgtagactcagttgaaaaaacttttgttgcattgttttttgtaattctagcgtttatatttaacattgcaccaataaaggttattttacagtttttatttacagaaaatttttacataataattcttgcatacataattactaatgcagttacaaaaacaggtgtcgcaaaaattatttctgagaagttaattttaaatactgtaaatacccctaaaaagatgattcttttatcgtatattttaggtattcttttaatattttttatcccacaaccatttccaagggttattcttgtatctgctttttacaaggagtttttaaaagaacaacagataactgaagattcaaaatctatacttttatttagtatatttacagcatctacctttacatcaatgttttttgtaaatggagacacccttctaaattatgttgtactagaacttggaaattgtaatataaattggggtcaatgggctttttatatgtctgttccaactataattacttgttttataacttattttttatttatctttgtctttaaaaaagaattgcattcaataaaatttatttctaatgaaaatcttgagggtaataaacttcatttttcatattctaatttaaaaaaagaatttaatttgctaaacaaagagcaaaaacacgtatttttatgcctaggaataatgttttttatgtttttaactcagttcatacataacataaacacattaattataatgtcaatttgtgtacttcttttattactaagaaaaatagttggatttagtactttaaaagaaataaattggaaggtccttattttttttatagcagcattttcaattggaggagtgttaaagtactctggagttgtagatataatgggaaattatttgataaagtttataccaaactcttcagaaattatttcaatattgtttttgataactctcacaataatcttgaatatatgtcttggaagtgctgtcactacatcatctgtagtaataccattacttggaagtttacatatactaaaggaaaatagtgttactttatgtctatttgtctacattatagtaagcatacagtacatattaccatttcatcatgctacaataatggttggtcatggtgaaaatctgtataatagcaaggttattttcaaatacggtttaactttgattcctttaacctactttataataatatgtataacattcccttggtggaaatttataggactagaaatctaaaaaagatgaaaatatgaattaacttaagataataacgaaattattaaaaagaaaattcatattttcatctttttatataagttcttgtgaaattggacaaaactactcttttaccataatactaaatattatttgttttacttccttttccaaaagtattctcccaatcctctataaacttatctacactccaatcagttaatggatgattcatcatagatttacaaatatcatatggtactgtaacactatgcaccccatgttgcattaattctataacttgttgtgcatttttaaaactggctgcaagtacttttgtatccattttataagtatctattatttttataagttctgaaaccatagctactccatcaccagatatattatcaagcctatttacataaggtgcaatataatttgctccagcctttgcagctaaaaaaccttgatgagcagtgaatattgcagtagcagttatttttacaccttttctgtgaaggtcttttatagctcttaaaccatcttgtgttacaggtatttttacatatatattttttctcaaactacttatatataatgcttcgtctaatatttcttcatactttgtacttaacacttgagcatgtataggcatatcctcacctataatctcaccaatttcatttataagttgcttaaaattctttttttcttttgaaacaatacttggatttgtagttacaccatctattggtaaacaagtacataactccttaatctcctccacattacctgtatctaagattagttgcattaaaatatccccctttaatctttctttattcttattatatattgatttggtattattttcaacattttgcttattgttttttattttttattattgttttgcttttccttcttagttttataatttttttatttactaaattctaaatatatagttagaaaaaacatactttttatattaaattaattttgtatttcatgttaaaatagttgatatattgtattttatcttataatatttactataatactatattgcgaaaagaggtagaaaatgtttgcagaagaaagaatccaagctatattaaatatcctaaaaaaagaaggtagagttactgtcaaagagctcagttctaaatttaatgttacagaagattgtataagaaaagatttaaaaaatatagaaaagatttcttcaataagaagaatttatgggggagctgtactagctagagaaacactagagaatcaggatacaaaagacagaaaagaaattaatattccaacaaagaaaataatagcagaaaaagcatttaatttaattgaagatagagaaactatatttttagatatctctacaattaacatcttgcttgcaaagttgttagctgaaagtaataaaaaagtaacacttgttacaaatatgttggatatactaaatgtagttacttcaaaaccaaataatttaaatataatttccactggaggtttattaaatctcagtttagacggttttgtcggtactccaactatagagtttatatcgaaatataagtttgataagacttttatgggaagttgtggagtagatgtattcaactcttcacttacaacttttgaaattgaagatggtctcacgaagaaggctataataaattcaagtaaaaaagtatttatagttatggaagataaaaagtttaaatttgatggaaatttcaagtttgctcatttagaagatattagttctataattacagaaaaagcgcctactcctgatatagtagatattttatcagaatttaatgtaaatgttttataagtttaattatatattttataggatttcttataaatataaatttttatttgataactattcttaaaaacatatttctataatatttattttatccttagtatctattttttaaaatctagttctataacatctactttatccttatgtctatttataaaactaatttgaaatagactttctaaatctaatacagttatttttagaaagtctatttccttaaataaactatttaatattactggctactttttatatgaatacaataatttgttattcataaataaaagcttatttcatttcattcttcatttgcttctctaattctttagaaaatttcttttgttcatatctttccatcatctcatcttttttcatttctaagtttaccatagcaccttgtgcatcatctttcaaatcttcagctgtatttttcataacataagctgtctttttaacaccttcttttaaatcttctttcatatttttcatatctctttttaatctatccatcaaaactacctcctctgtaaatataatacttcctatatttatttttcccaaagtacatatatttatttgtaatatcaattataatttttaagtcttaaatatagtttaaactgtctaaatctatacatttcaataaattaaatattttttatttcaaaataaaaataacactaagcatagattatatgctcggtgttattttttaaattcatagtaacttaattgttgggttactataatgatgacttatatggaggatgtaaggaaatctcatcattatagttggtgtattttatggttttaagcttctttatatttatataatacagtttcattatgaattttttgtgattttaaaatgaactattattgaaagttatatattctttataataagtaattaatttttaaattctactgtgaatactacagagttttctttgttttttatgctataatcaaacccatgacttttaaaaatttgactgactatataaagtccaagtccacttcctccagtttttcttgaacgggatttttctattctataaaatggattaaatatctcttctaaataacgtttctcgatagttacaccagtattttcaatttctaaaaccactctttgattagaagtctttttacttattcgtttatttttatcatagagtctaattataagctctgatttttcaggagaatattttatggcattatttattatattattgattgccttagttattctctcttggtctgctttaatttccaaattttcttctatttttaaaatagttttcatatgtttttcttctattaaaaatacttgtctctttacaagtctatttaataattcacttatatttattgataccaatttcaaatctttttcaagtatttctgattttgaaacctctatcatttcatttactaaatcttttaattcttgtgtacattcatatgattttttcagataagtatccctatccttatacttacctacactataaatcataccttcaatttgaccacttattatggttattggagtttttagttcatgtgatattgtagcaacaaaatccttccttctatattcctgttctctctcactctctattatatttataagaggctttgttattacaattgaatatatatatgctccaataatcgctatcaatattgctattgatatgatgtatggcattagttttcttataacttcgtttgcttcgtcaattggttgtaatggcataacgagttctaaagtatatggaccatcttttgcatctttagtatatataggtatagaagttctatactcatcctcaagactattaatcatgtacttactatatcttaaaataactacttcattcttaccatatacaattttcccttggttatcttttaataaaatagccaaattttggtctttagccatataataaagtctttcttctaaagtatatgtatcgaaatgaattgaactatctactaaagattttaaactttcttgaagagactcaattttatactcatgataatatgatggcaataaaaaatataaaattagatatattattaaagctaacgctattaataatgatgtcgttattgaaaataacttatactttatacttaacttttcccacttatcaaatatccttctcaagtgtatatcctattccttttacagttttaatatatggtaacgatattttttttcttatattttttatatgtgcatcaacaatcctagtatctccataatagtcataaccccatatactatccaaaagaccttccctagttataacttgtggatacttttctatcaaagcttttaatatattaaactcttttagtgtaagttctataggttctccatctatctctgcaatatatgtgtttaaatctaattttaatttttcaaaaactataaatttgtcatttatagtcttgttacttcgccttaaaattgcttctactctttttataagaagattaaatgaaaatggttttgttatataatcatcacattctaagtcaaaccctttaagttggtctccttcatcatttaaagcagttaaaaatataattggaacgcttgatgactttcttatcattttacaaactccataaccatctaagtttggcatcattatatctaatattactaaatcataacttccttgcttaaacttttgtataccttccaacccatcatttgctgtatcaacttgataaccttctgcacttaaaaattctgatattaactcttgtatatttgaatcatcttcaattacaagtattgacgaattcattctatcaatcctttctattttatttaaaatttcgtatattacttatattttatcttattgttgtgaattttacatgaaaaaagagctatcttaatttgtaaattaatccttttaatttaaagatagctcttttggatacattttatttaatttattaatctaatctctcttatatgccttgaagtttttaagtctaagtgcatttgatacgactgaaactgaacttaagctcattgctgctgctgcaatcattgggtttaataaaggtcctccaaatacatataatattcctgctgctacaggtataccaatcgtattatatccaaatgcccaaaataggttttgttttatattttttatagtttcatgactaagtttaattgctgttggaacatcaattaaatcactcttcataagtactatatccgcagattcaatggctacatccgttccacttcctattgctatccctatatctgcttttgcaagagctggggcatcatttattccatcccctaccattgcaacaaactttccttgattttgtagtttttcaacttcttttgacttatcttctggtaaaacctctgccaaaaccatatctatacctacttgatttgctatagcatttgcagttttcgcattatctccagttaccattgcaacttttattcccatatcatgaagtatttctattgcttttttactactttctttgactacatctgcaactgctattatacctgataaatttccatctacagctatatacataggtgttttaccttggcttgccaatacatttgatttttcttctaaatccccaagctttatattattgtcattcataagctttctatttccaagtaatatactttcatcattaatagtaacttgtataccagcacctggtatggctttaaaattatcaactttttcaaattttatattcttctcttctccatacttaactattgcttctccaagaggatgctctgaacctttttctgcacttgaagcaatcttgataagatattcttcttttacattattatttaatactatatctgttacttttggctttccttctgttatagtacctgtcttatcaaatatcactgtatttactttatgtgcagattctagtgcctctccaccttttatcaagattccattttctgcgccctttccagtcccaaccattatagcagttggtgttgctaatcctaatgcacaaggacaagcaattacaagtactgatataaatatagtaagtacaaatactatatcttttcctcctattaaaaaccacaataatgatgcaactacagctattgcaattactattggtacaaaatatccagatacagtatcggcaagtttagcaataggtgcttttgtaccttgtgcatcttcaactaactttattatttgggcaagagcagtatctccaccaattttttcagccttaaacttaataacaccatttttattaatactagctcctgtcaccttacttccaacatttttttctactggtatactttcacctgtaagcattgattcatcaactgatgtatatccttctattacaactccatccacgggtattttagttcctggttttactaatagtatatctcctatctctacttcttctataggagtttcaacttctttaccatcaactaacactattgcagttttaggttgtagccccataagctttttaattgcttctgatgtttttccttttgattttgattctaaatatttaccaagtaagataagtgctattattattcctgcactttcataatacaactgatgatggtgcataccttgaatttgtccattggctatttgtagtgtcgtatatagactatataaaaatgcggctaatgttcctattgcaactaaagaatccatattagggcttaaagaaaaaagtgatttaaacccatttatataaaatttataaccagctatcattactggtattactaaaattaactgaattaatgcataattaaaagtatttgtcataggatttataatttctggcaaaggccatggccctataggctttattatcataggtcccattgctatataaaacagaggtactgcaaatactattgcaactataaatttaacaaataaagacttcatttctctttcttttctcaatttatcttcatccacatcaaccttatttcttacctcttctattggtttatatccagctttttcaatagctgcttttatttgagataattttacttttgatgggtcatagtctatattagctttatctgttgcaatattcacactaatactttctactccatccaatttttttaccactctctctacagcttttgcacaagctgcacatgtcattccatcaattttcatatcaatttttttattactttcttcctttataattccatatcctgctttttctacaacctgctttatatcatcaaaattaaccttagaattatcatattctattttaagtttttcagtagctatatttacactttggtcatatactccatccatcttcttagttactctttctactgcctttgcacaagctgcacatgtcatacctgtaattttataactttctaccactttatttgaactcataataaaatcttcctttctttcaatatattttcagctaatttgtaacgttttattttgatatgtaatattgataaattacttatttagaaatctatatttttattataccccctataggtatattaaatcaatatttttttaataaataaatgtattagttatatttatttgtatttaatagaaaagtatactcataattaaatgtatatataaaaatagagcatctaaattgtttaatgcttatacaatttagatgctctatttattataatttatattttatttaaaatttattctttacatgcttcaaaaaactctgcttctgtttcctttatttcaagctcattgtctattattccaacagcttcttttttaaatgctctacactgacctatacaaccagtctttacattttcttctccaaccaaagtttttagcttatttacatccacatttgaacagtttggacatactcttatcatatttaagttcctcctaattaatgtctaattaatacttttatacccaaatataaactttataaaagtttttttaatataaattattaccatatataccatttatatcctattgtgagtattacatattaattttatatattattaatactacatgtacggtggtatctgttgttttctcactatttccaattccttaatttctaaagacttaatcacatttactttatagttttctttagactttatatacaaaacatcttctatctttttaccttcaataaatttatgagaccacttaagaagttcttcaaaattacaaacttcttcttttataaaagtatcactttcacttgcaaaatatttaattattattttggttacttccaacatatatcatcctttactcttttattaatctttttatctattaagattattatttgtctaaaaaatttttttaaacagaataattttcagatgcaaaactaacagttttatccaatttaaactatattaatacaatttaatatattcctccttgtacctaataatatattgtgctataattaataagttattttaatcgaagggagcaacaaaaatgtcacaaaaacataaaattataaatatcgcagttatagcccacgttgacgctggaaaatcaacattggttgatgctttcctttctcaaagcggtgtttttagaaagaacgaagtagttaaagactgcgttatggacagtaacgaccttgaaaaagaaagaggcataactatatattcaaaaaactgtgcaataaactatgaagattacaaaataaacatagttgatactccaggacacagtgacttttcttctgaagttgaacgtgttatgaaaactgttgacacagttattctattagttgatgctagtgaaggcccaatgcctcaaactagattcgttttacaaaaatctttagagttcggtttaaaaccaatattatttataaacaagattgataaaaaagaccagagagcggaagaagtagttaatgaagttttcgatttatttgtagacttaaatgcaacagatgagcaatgcgaatttcctataatatatggtattgctaaacaaggtattgctaaacttgaaatggatgatgatagtgaagacctttctcctctatttaaaactattgtaaatcacgttgaagcttatcctaattacgataatgaacctctacaattccaaatatcagctcttgcatatgatgattatgtaggtagacttggtataggtagaatttacaaaggtactcttaaaaacaatacacaagttgctatatgtagagaagattctgttgtatctaaaggaaaagtatcaaaactttctgtgtatgaaggtttaaaacaagttgaagttgatgaagctactagtggagaaatagttgttatagctggtattcctgatatatctataggtgaaactatatgcgatttagatagtccactacctatggaaatgataaaaatagaagagcctactctttctatgaacttcttagtaaacgactctccattcgttggaaaaagtggaaaattcgttacaactagacatttgaaagatagacttgaaaaggaacttgaagtaaatgttggtcttaaagttgaacctcttgatactactgatggatacaaagtttctggacgtggagagcttcacttatctatactacttgaaaatatgagacgtgaaggttatgaagttggtgtttctaaacctgaagttttaatgcataaagaagatggaaaactaatggaaccaatagaaagagttgttgtaaactgtcctgaagtttactctggtactattataaatgaattaaacatgagaaaaggtatgatggagtctatgtcaatagaaggagactatgtaaaaatagagttcttagcacctactcgtggtcttttaggatatcgaagtgaatttataaacgctactcgtggagaaggtactttagttcgttcatttgaaaaatttgaagaatttaaaggagaaataccttcaagaggaaatggtgttttaatagcacaaggacctggtgttactatggggtattctcttaatgccttaagtgatagagctgtaatgtttgtagaccctggtgtagaagtttacgaaggtatgataattggtatgaattccagaaaagatgatatggtagtcaacccttgtaaaaacaagaaaatgagtaacgtacgtgcttctggttcagatgatgctataaaattatctcctcctagaatatttactcttgaagaagcactagagtttatagaagatgatgaattagttgaaattacacctgattctataagacttagaaaaagattcttaaatgaacatgatagattaagatataacaaatctagacaaggtaaataaaacgtacatttacctctaattaacaaaatagccatatagtactgaaaaattatttcagtttatatggctatttttatttgaaatttatattattcaacatttatataattagctgcttgaacggctgcaatagctccatctgatgctgctgttattatttgacgtaaaaacttagttctactatctcctgctacatatacaccttctactgatgttgtacaagactcatctgaaattatatatccaccttcatccaaatcaagaacattttcaaacattttattattaggtttaagacctatagcaataaaaataccactaacatctatagttcttttttcttcagtctttaagttttttacttctattttcgatacagtcttttctccttctattttttctacaccatgactgtaaagtatctcaatattctctcttgctttcacagatttctccaacacttcttcacctctaaaactatctcttctgtgaattaaatacacttttgtacaattattagctaaaaataaagcatcttctagtgcagtatttcctccacctactatagcaacttctttatctttaaaaaaggctccatcacatgttgcacagtaagatactcctctacctgtaaattcttgttcccctgcacaacctaatttacgtctttcaactccatttgcaagaataacagcctttgctttatgttcacctgaagaagtttttacaacctttacttttccctctaaatttatctcttcaacctcatcaaactgaatatcaacaccttgagcaactgcttgattgtatatattattagaaaattctaccccagaaatcttttgaactgctggataattttctacctcagaggtacttgcaacttgacctccataaatatttttttcaaatactgtaacgcttaaccctgctctcatagcataaattgctgaagttaaacctgctggtccagcaccaattacaatgatatctaccataatgtttacctctctttatattattatttcttatatattattctcatcattcttatactttactattattatccatatatactacaaacaaaacattattttttattaattaactttattttacatatatataaaaaaactgcaaataaaaattaacttttatttacagttctcacttatttatataattcaaaaccttattggttatcatttacagtgtcttctaatatattgctttctgatatatatgatagaattgaaagtccatacataaccaaaactaatgctgctgttataagtactattcccatatttaatacctccttttgtttacagtatactattattatgtgaaatatttatgaatttaatttgaatatatatgtaatttcacactaacaatttcttcaaattaaacattattaactatatacttttgttgaaccaattatgattaatagtttaaatattagcactatttacttatatttatatgatataccatataattacatttttcaaattaaagttttgtaaactttttttgtaatatagtgtagtataaaattgtaatattacagatatttaatagttatcttttgattactttcattaaaaacagcttcatcactatgaaaatctaggtttttaaacttttaaaaaagttaaaaaaatatttttctaatactcaatttgattacaatttttttacaatttaaaaaatattttttccaaatttttatattaatacttgactttgtctgttttataaactagaataattaataatattaagaatattgaaaggcattgattaggaagagtaaatctgaatcgattaccagagaaggaaactactagctgaaatgtttccctaattagaaggattgaaaactacctaggagcttctatccgaagttatcttaatgattttagtaggaatagacgtttttattacttgcgttaaagtatcaagtggattttttaaaatcaatttgggtggaaccgcgggaaacagattctcgtcccttttttagggatgagggtctttttttattacctaaattcggtttttaaaatattctgtatctaatttaattagctaattaaaaatttaaaatatatggaggattataaaaaatgtattattcaagtacgagaggcaccgaagaaaaagtaactgcatcacaagcaataataaaaggaatatcaagtgatggtggtctttatgttccaagtgaatttcccaatgtaaaaaatgaacttataaatttagtaaatttaacgtattctcagatagcattttttgtacttagtaaatttttatgtgattttactgaagatgaaattaaaaattgtatagaaaatgcatatgatgaaaagtttgattgtagtagtatagctccattaaataaagtaaatgatacttatttcttagaactatatcacggtccaactttagcatttaaagatatggcacttactataatgcctcatcttcttaaaacatctataaagaaagataatttagagaaagatgttgtgattcttactgctacatctggagatacaggcaaagctgcacttgagggatttaaagatatagataaaataaagataattgtattcttcccagaagatggtgtaagcccagtacaaaaacttcaaatgaaaactcaaactggaaaaaatacatatgtagttggtataaaaggaaattttgatgatgcacaatcaggtgtaaagaagattttttctgataaaaaatttaatcaaaaactattggataataattatatattatcttctgcaaattcaattaatataggaagacttcttccacaagttgcatactatttttattcatatatgaaattagttagcaatagtgagataaatttaaatgataaaataaattttgttgtcccaactggtaattttggtaatattctagctggatattatgccaaacaaatgggtcttccaataaacaaattgatatgtgcatcaaatgataataatgttctttatgatttctttaaaactggtgtatatgataaaaatagaacattgaaattaactacttctccttctatggatatattaatttcaagtaatttagaacgattactgtttgaaatatcaaatagaaatactgatattgtaaataagctgttatcagaccttagtgataaaggagtctacaaaataagtgatgatatggaaaaaaatttagcctcattctatggagaatattcaaatgaagaagaagttaaaagcacgataaacaatgtgtttaaaaattataattatttgatagatactcatactgctgttgcatacaattgttatgaaaaatataaaaaagaaacttctgataacacaaaaactgttattgtaagtactgcaagtccattcaagttttctgaagatgttctaaagtctatagattgtgattttaaagaccttgatgactttgctataattgatagattatcaagtatttctaaaatagatattccaaaacctattaaaaatcttaaaaatgcagaaatactacataaagatatttatgaaaaagatgaattaaaactagctataaaaaaattcttaaaggtataggtgattattatgttagagattatagttcctgcaacaagtgctaatataggtccaggatttgattgtcttggaattgcgttaaatatatacaataaattttatgttgaagaaattgaaagtggtcttgaaatagaaggttgtgaagatgcttacaaaaacgaaaataacttagtttatacatctatgaagtacttttttgatagagttaaaccagaaaaaatacctgctggtatcaaaataaaaatccacagtgaagtacctatatgtagaggtcttggcagtagtgcctcttgtatagtagctggagttatagctgcaaatgctctatcaggtgctaatttagataaaaatcaattattaaatatagcttcagaaatagaaggtcacccagataatgttgctcctgctattttaggaaatatgatcgtatctgttactgataatgagaatatacattatgatattataaaaattcctgaagaacttaaattttgtgcaatgatacctaattttaagttatcaacagaaaaagctagaggtgttttaccaaaggaaataccatattctgatggggtattcaatgttagtagagttgctttactaatatctgccttactaaacaaaaactttgacctacttaaagtagcttgtcaagacaaattgcatcaaaattatagaggaactctaattgagaactacaatgatattgttgaaaaatctgaacaattaaatagtattggagtatttttaagtggagctggacctactataatgtctttaataaaagaaaatgatgatagttttgtggataatatgaaaaattacctacaaaaactaaaatctgattgggaaataaaagagttatgttgcgattctaatggagctgttttaaatataatataattatcgtcttctatacaaaatataactactcttttattataatttgtagtataataattaggactaggtaataatattaagtattataatctagttctttaaacatgtttacattgaggagggattatcataaaagagttaataattagagatttagttgcaaaagttcctataattcaaggtggaatgggcgttggtatatctaggtcatcactagctggtgcagttgctaagcttggtggtgttggtgtaatttctggagttcaaattggatatgatgaggaagattttgaaactaatactataaatgcaaatttaagagctataaaaaaacatatttctaaggccaaagaaatctcaaatggtggtattattggtattaattttatggtagctatgaaagaatatgaaacatacgtaaaggaagctgttaaagctggtgtagaccttataatatctggagctggattacctaataagctaccatcattagtaaagggaagtaatgtaaaaatagcacccatagtttcaactgcaaaagctgctaatgtaattttaaaaatgtgggatagaaaagagaaaactactgctgacttaatagttgttgaaggtccaaaagctggtggtcaccttggatactctaacgaggaacttgataacatagattctatagactatgataaggaatttgttgaaattttaaaggttgcaaatacttatggagaaaaatttggtagaaacataccagtagttgctgctggtggtataacttctagtagtgatgttaaaaaatatatagatatgggtgcaagtggtgtacaagttggtacaagatttgttgctacttacgaatgtgatgcccatgagaactttaaaatggcatacataaatgctagtgaagaagatgttcatatagttaaaagtcctgtaggtcttcctggacgcgccataagaaacaaatttatagaagaagttaaaataaatcgtccagaaataaagaagtgctataattgtttgattccttgtaatccaaaagaaactccttactgtatttctcaagctctaatcaatgcagttaaaggagatgttgaaaattcacttttattttgtggaaatgatgcctataaaattgataaattaagtactgttgaagatgttatcaatgaattgatttctgaattataatttaaagaaaactaaattaaaattttatcaagctaaggagttttaatacgttatttattaatctttataaacatatttatgtccttagcttttttgtgtcaatttccttttattgaaattttaatttaattagagatagtattaacccttataactaatcttcttttacaagtacattggttatttcagctatatataaagtatgataatctttttgtggataccatcttccatctataccttcagcaataaaacattggggttcaagtttctgactataaatttttttgcatataatagccattttagcttccttaaaataaggtgtatcatttaagtgttctatattaaatccaatctgtgatatcttatcctcttctctaccagatacctttccacaatatgaaagctctttacgaaaatcttcatcaaaaaatgtaagagaaaatttatctgtattatctataaattccttagtataacgctgtggtcttattactacaaaagcaacatcttttccccacataactccaagtcctccccagctagcagtcattgtattcactttaccttcattttctgctgttataagtgtccaatctttacctatcaatccaaatggattatttttaatctcttctgccaaaatttctttaaaatcactcatatctctaataacctctcattctcttatatttatattccttttattttcgtgataaattataaatgaagtctagttttgaaaataaaatacttttttaaatatattattgcaaataagtaaatatatatatacactcttattttttaatatatttaataatttcactcagaatatatatattctttactcaaattaaatataacttatatactttatgtgtaaattatggtaaaaatattatttaatcaaatcaaaacttgatttatatacctggaaaaggtattatattaaagagtgcttaaaatacgcatttcataaatagctatatataaaataataaataaggagagtgatgggcaatggatactagtccgttgcggagagaattttttacattttcatcacttaataatatctaaaatcaaaactaatacatatattcagttatataaattagttaattaatagatactattaaatgatgagatttatataaaactgaataaaggatgtgttgccatgataagatattacaaaactatagattcaaaattagagaaacttagtttttttgaagatggctgttggataaatcttgttgaacctaatcatagtgaaatcaacgaaatttctaatttattaaatatagatgtagaaagcatagaatctgcactagatgaagaagaacgctcaagaatagatgttgaagacaatcatactcttatacttatagatataccagtagacgaaagtgactctaattcttctcattatactacaatacccttaggtattatactaactgaagaagctattgtaacagtttgtgatgcacagactaagattttaaatgactttatagttggtcatattaaagatttttttacgtttaaaaagactcgctttttgcttcaaattcttcacaaaaatgcagcttattacttgcattacttaagaaaaataaataaaatgacaatcataatagagcgagaaatttacaaatcaatgaaaaacaaagaattggttcaattattggaattagaaaaatctttggtatacttctctacctcactaaaatctaatgaacttgttttaaacaaaatggttagaactgctggtataaagaagtatccagatgatgaagacctattagaagatgttatagttgaaaatagacaggctcttgatatggctaaaatatatggagatatattgagtagaattatggatgctttcagtgcaattataagtaataatcagaataatgttatgcaaattttaacagtagttacactaattttctcaatacctacaataatatcaggattctttggtatgaatgtcatcaacatgccattttctaataacccaaacggattttggataatacttcttattacctctataatatgtatagtgattacatttttcatgtcaagaaataagctattataaaatattaataaaaaagccattagaattaattgatttacatttatcctaatggcttttatatatttaaatctatataatcttataatactttttaactatcatgttcttcatctataatcatttcagtttcaagcccttctagcattgaatctaaactttcttttatatttagtatataaattggtacatactcttcttcatctattacctcttcttgcaacttaaatggaggaattaatacttcatcaaagtctatatttaaattgggaaagccttctactatctcttcacaattatcgtactcttcatttgctaaagaaatgtacatatctaggctctttttataataaagacctgcaagcatatactcacacttcttacttccatatttaataccttctttataatatttctcagcttctgcgtcatcatttaattttaaataaatttggcctaaattatatattgattcaacacaaccttgtgctctagccttttcataccaaaatttagaatttacataatctttatagaacatatcataaattaatcctaccatatgttgagcgtacacattattttcattggcaggtgtatcaaacatcattttagactcttccaatttaccttctctaaaataaattctacctagatgtatacgagcattcatatgatttttgctacttgccatttcaaaatactttctagcattttttgtatttcctaagctctcatatatacaccccaatctataactagacctcgtatctccattttcagatgctttcttataccaacttatggcttcttcaatattatttaaatcttcatagatatttcctaatttgatttgacaagatgcattatttggaatcctcgaataatacgaaatcgctttttctatatcttgattctgataatataaatccccaagattttcaagggaacttttgcatccaacagctatagcatcctcataatatttaatagcattttcataatctttttcttcaaaatatatacctgccagattattttttgcttctgttatatcatcttcagcagccattttataataagtttttgccttctctatctcattttctctattatataaattagcaagtctatacttagaaagtgtatgatttttttctattgctttctcataataataaattgcatctcccagctcttcttttctatcatatacatatgcaagcctatactcagacttcacatcatctctatcagcactctttttataatacttctctgcatcttctaaattatcatttatttccataatcatacccaagttaaagcaacctttcatatgacctgacttgtacaactgtttatataaacttactgttgatttattatctttcttttttccatttaatattgctaaattatattttgcatcatcatctaaaagcacagaaccttttttatagtattcatatgcttcatcatctttctccaaaaaagtatataatacccctaaattaaaacaagctttacctaaattcttgtctgctgctgtttttaaccatttttcacaccttacaaaatctttcattttaaaatggcatacacctaaattattttgtgcttgtaaataacctaaatttgctatcttttcataccaatatatagcatattcatagccatctaacttatagtacatattacctaaatcaaaagcagcatcttcacttccacttttatatgccattgaataccacttttctgcttctttaaattgttttttactttcatatatatttcctaaagtatattgagattttacgtaattatccaatgcagcactcttatacaactctattgcgctttccatcttacccatcttttcaaggagggcacccttagtatgtacgactttcgggtcattagatatattttttattttttttatagaaaattttgtatttttcattattcgctacctacccattttataaaatatattctctcaaacattattatacattataatctataattaatgctataatattgaatttttaccttttgtcactatattgtaacattaaattttaaattttataatcattagattttattatgtaattggtatataatgtatatatagggggggacattttatgaatttcagcaatatttttatccaagttgcagttttatttataattattttagttggatattttgtcagaaaattcaacttattagatgaccactgcacatctaagctttcaactttgacaatgacagtttttttaccatcaatgataattagctccatgcaaattaactttgatagtaaaatgatacaaaaaatactattgttattatttacatctttgattatgtatatagtttcaattataattgcatttttattgaaatacattttaaaatgtaatgataaaaaagatttgggaatatatcagtatatagttgttttttcaaatgttgcttttatgggttatcctgtaattgaagcagttttaggtcatgaagcaatattctatactgcaatattcaatttgccttttaacttattttctttcactttaggaatttatcttttatctaaaggcagtacaagtagaggtttttcaataaaatcacttataagccctgctacaatagctattgttattggactttttttatttgtaacaggacttaggttaccccaatttataaacgagccacttgagatgttgggaagtataactacaccaatatccatgattatcattggaagcttacttgctaattcttcagctctcgattgttttgtcaacaaaaaattatatatagtcacttttataagattattggtacttcctgtgattgtgtattttattctaaaaggatggataaatgataagatgattttagctataccagtagtaatttcttcaatgcctgctgctgcaaatactgctataatggctaatcaatatgactccaatataacactagcttcacaatgtgtgttttttacaacactattttcagttatatctataccttttataagtattttactcttatcttgatttatttttttatgtattatataataacatattcaataaattacaaatataaacattttattgtagtatattgatggaattttttcctagatatttgtcaataatatctatatgtattatagaataggaggcttaaatatggatatggatttactctttaaaatagtatttgctatagttgctataggtgtttctgtaaaaatcattaaaactgttgctagtttagcttttaaaatagcgttgatattgctaataattttatttgtatatagaatgtttttgtaaacatttaaaaataagttttttaatacaatagagaagtaaaatagattatttttaatgtaaattttttattaaagacactctattttacttctctattagcttctttaaattaaatttttattatatcttcccataatataaacatcttcaaattttccatctctgattacagcatattttttagttccctctatttcaaaacctagttttttatataaatttaatcccttttcattatctacaattacttctaatcctactctagttaacataatccaattatctgctatatctaaaagttgttccataagcttcttacctactcctcttccctgataattctctgcaacacttattcctatttctgcactatgtctcaatcgtggagaagaatttacatgtaacccagcaaaacctattacatctttttctccattattattagtttcagctacaaacatataatcattttctcccaaagaagctaacatagcttcagttttatcgactctgtcactcattaatgccaaagtatttctcataacactgtatgttcttctaatttcattaaaagcttgtgcatcttctcttcttataggtcttattgttatatctataggcttactcatattggattccccctcaaacataatctttatttttaattaaaattttacatctttattttatactgttcaaatctatgtatgcttctacctgaggtacatatatcatattatcttttatatgtgtacttccaaattcttttaattctgtaccttctttatccttagttattttatatctaatggattccataccttcaactacttcagcatgaaaaaacataccttcatattgtttaaatctaaaattaaaattgtctttagtaagttttattatcatatttttatctactccttatataattgatatttttcttattattagttgtatatatactgcttattcatattaatatattataacttatcatttatttagtataaagttataaatagatatatttatacttattttacaatctttcttcaattgatatataatatgtttatataaactaatgtatgtgaggtgaaatatgagcaaaaaaacaaaatatttttctttaattctctttcctattgctttacttttaaattttatagccagcaaagttccaaatattgttgaaaaatattactcccaattcatagataaaataattgtacaaatattgagtaaagtttctggaattttcccattttctctctatgagattacaatgtacataatagttatatctatcttcttatttttatgttgtactttatctacaatttttaataagaaaaaaaattaaacatatttttaaaaaattccattttaaatatattatccattgtatcaatagtctactttctttttgtagtgctttggggaataaactataataggattccactagaaaccacacttataaataactataatttaaaaaacaatacctctatccaatcaaaacaatatagtgttaaagagcttactaaattatataaattccttgtaattaaagcaaatgaaactagaaaactcacattacaagataaaaatggtattgtaaaatctaatacagattataatggtgtcataaatagagctcaactaggatacgataatatcttggatatattacctagtgttagtggtagttattctaagcctaagtatattatttcatcaaatctaatgtgctatacaggaataactggtatatactttccttttacaggtgaggcaaatgtaaatatagcaatacctgacttatatattccttgtacagttgaacatgaaatagcacatcaaaggggatttgctagtgaagatgaggctaattttatagcgtatcttacttctataaaacacccccatattgattttaactattctggatatattttagctttaaattatactgcttctgctttaagtaaggttgattataatgcatatgttgatatttctgctggcatttcagattctgtccgtagagatttaaaaaatgaaagtgaattttggcaaaaatatgaaggtaaaattaatgaaatttctaatgagtttaacaattcttacttaaaagctaatggcgttactgaaggtactcagagttatggtaaaatggttgatttattgctaacttattatgaattatatccatataactaaacactacaattcaaaattttattcatatacagctgatattaaatcagctgttttctatttaaataaattatttaacttcaagcaatcttatataatttgatagtacttatactatctgtataacatttcaattctaactattttagttaaaacatttctattatcttttttaataaatgttttaactaaaatttttaaaacataaaacttccacattatttcactatctatataaaaatctaaaaattcacatataaaattacataactaaaaaatcataaatttatagaaaacatatattcaaaataaaaaagcatgtatcaaaacttgacacatgcttttttattttgaatatataccattttgtcacaataaaaatttccttgtaacactgatatttttaaacaaaatagtccttatttaattaaattaacattaattaaattcgtactcattttgctatcattaaacattacttatagtaattttctaatacactatttgaaacttccttcccttgaaaacttttcaaccaattctcatatgctgaatttttccatatactaccatcattaaatgttacttgttttacacaagatataatgtactttacaccatgctctccagttgattgtttccatttatcaaacaatagaaaggcatcattttgattcttacctggtgctattgcattttgctttgcatattctttctccatttgtttccattctttcaaccaattttctacccatgccttgccttgttgtttttcaaacatacttattatatcctgtggtggtgattgttgcatttttctataagtatgtgaatatgattttggagacacaggagatatgcctgtaacaataccatagtctacaccagctgggctaaatccaacacttcctacttcgccatctgctgccacattttgagcatcccaatatagctcaagtggttttccatttttatcatatgctaagcatgtaatctcataatccataattgccttttcactgctatttgttaagcttataacattgctaggccaatgatatggagtatcatcatactgtattttgctattatttataaataatggaatattctcattataaacaagacctttactactttgaatatcggatactttctttgtgacagtacttaccgtacttgctaagtatacatttgttttttctgaattggtcgtactaagagaaaatgttgttgtcgttccagtaatcagcaaagcaacaactaaaataggtaagctagatatttttttatatctcacagttcttcacctctttttctattaacttataataaaacaatttaccaaaacattaaaatctatgttaacataatttaccaactgttctagtaactatatcctatcatagttactatcaagtttcaatactattgatggaaattttcactatattaaatctttttttaattttataaatttacaatatgatttaactcatacatatatagtcaaattagaatataagtttcttacatttaatgaagtttataaaataaaaaatgactagataattaaatactgtaaataaaaacttattacaaaagtatttaaaaatctagtcaattaatatatatatgaattgtatactataatttttcaatctcttctagcaactcatcaactaatttgttaccatcaatcattctaactatttcaccctttttaaataaaagaccttcacctttacccccagcaatacctatatctgcttctctggcttcaccaggtccatttacagcacagcccataattgcaacagtgatatttttttccatactaccaatcttttcttcaacctcatttacaacactaattaagtctatattacatctaccacatgtagggcatgatataactttaatcttatcatttaaaagtcccaaacttcttaaaatctgtttaccaacaataacctcttcaacagggtcgcctgttaaagatattctaacagtatctccaattcctttaagaagaagtgctcctacccctatagaagactttattgttcctttgtgaacacttccagattctgtaattccaatatgaagaggataatcaactttttttgatattaattcatatgcatcaacagttttataaatatcggatgattttagagatataactatattatgaaaatctaagtcttcaagaatcttaatatgtcccattgcactttcaactaatgcttcagcagttgcagagccatgcttttttaaaagttctttctctaaagaacctccattgactccaattctaatttttaaatttctttccttacatttctcaactaccatcttaactctctctctacttccaatattaccaggatttattcttattccatccacaccttgttctatagcttcaagggctagcttataatcgaaatgtatatctgcaataattggtatatttacactagactttatctttgctatattcttagcagctttaatatcaggaacagcaactctaactatatcacaaccagcttcctctagtctctttatttgagctattgtagcatctgcatctcttgtatcagtatttgtcatagattgtatacttataggattttctcctcctatttttacagttcctacacttacttctctcgtctttcttctctcgtaactcatattccacctctatatattattttatattgaatctctttaaatagtaaaatattataacctacatgtatattataaattaaaaagctatctagttaaataagaataaatttcatacataaaaattaatttattcttatttaaaactacatagcctattttcttaaaatctctaaaaaactaaatcattgaaataatcttaatatatctttatatgtgataaaaagcataaataacattaaagctccaaaaccaacaacatttatcatgccttctttgtttgggtcgagttttttaccacctctaacagcttctagtaatagcataagtattctccatccatcaagtgctggtattggtaatagatttactatacctaaatttaagcttatgacagctgctaaatacactacatttatgatgcctgtacgagcagcatctgataccataccaataacacctactggtcctgctacagcattgccaatccctcctggtacacgtcctgtaatcatttgacctagaaatgttaacatctgttttgtcatatctacagtagttttacatgcatttactattgacgccaaaaagtctttttctctttgtggttgaatccctatttcatactttccattgttatttttaggtgttacatttacaactttattacttccatctctagttatactaagttttaattctccaccagaagaagtgtttattatatttgcaacttcatcccaagtcttaacagaattaccattaattttatttatcttatctcctacttgaagccctacagcctgtgcaggagtatctggcattatctttcctaatttagtcgttggagaacctatatacaaaaatactggaactaaaagtattgctgctaatattatattgaatattggtcctgctacaatagtactaaatctttgtaatatagacttgtttccaaaagaatttggacttatttgttcttcatcttcaccttccatgctgacatatccaccaattggaagtgctcttatagaatactctgtatctttttttacactatatatcttaggccccatacctatagaaaactcatttactttgataccacttctttttgcaaatataaaatgtcctaactcatgtattaatacaattatactaaatagtattaatgcggctattatagtcataaattcaccttcctatttttttatcagatttgcaacataagctctactccatctatctgtttctaagatttcttctaatgttggttcgcttatgctactatgaacttctaaagtcttctctatgtaatatggtatgtcataaaaaccaattttatcctctaaaaattcacttactaaaacttcatttgctgaatttaaaacagaagaataagttcctcccatttttaaacactcataggccaattttaaacatggaaaagtttctaaatctggttcttcaaaagttaaagtactaaattttgaaaaattcattctttcaaagctactttccattctatctggatatgtaagagcatactgtattggtagtctcatatctggacaccctaattgagcaattattgagctatctgcatactgcaccattgaatgaattatgctttgtgggtgaactactacatctatattttcttgttctaccctaaacaaccatctagcttctatcacttcaagtcctttattcataagcgttgaagaatcaatacttatttttcttcccatactccaatttggatgcttcaaagcttcatttttagttatatttacaagttctccctttttctttcctctaaatggaccaccagatgctgtaagtattatcttttctatattttttttattttctccatttagacattgaaatatagcactatgttcactatcaacaggaagaatatttacattgtatttttctgcttctttcattacaagttcaccagcagttaccaacgtttctttattcgctaatgctatgtctattcccttctttatagcacaaagagttgggactaatcctatcatacctactacagcagttaaaaggacatccacttcatcaagtgatgatattatttttaatccttccattcctgctaaaacttctatttctatatttttaggcaacatttcttttaatttcaatgccttattttcctcaaaaactgttacatatttaggtttaaactctactatttgttctagcaataattcaatattactgttagctgatattgcaactatctcaaacttatctctatgttctctaaccacatccaaagtttgtttacctatagagcctgtagaacctaaaattgatatctttttcatataataatcctttctaataataaatataccctgtcaaaacattataacactactaaaacaattatttttactattcatagaaatttcatatattattccacagattaaaattaatctattattttttgtatcttgtggaatattataaaatattctagtattattaaatgcccttttttatttccacaacatcttctattttacagtctagtgctaaacatatcttctccattgtatccatagaaacagatttatcatttcctagtctgcctaaaacagaaatacttatacctgatatatttacaaattccattttctttatttttctgtcaattaacaatttccataatggagcgtatgaaatcatgttatcacctcgcaaaatatattctatcacattttatctattttggaaaattttcatctatttagataaataattatttatctaaatagatttcaattatagtttattaaatataaatatgttaaaataaaacaaaaccataagttcaaaaattaagctttatatatatttatctcattattttactaaaacataactatataaaaaatatttactattatatatctatttaaaacacatcattatagtatcatataaacatatgtaaatatataattaaaaaagctaaaaattagtaaatttataaaaattatattttgaataaaaggagaaagaatgttgtatttattaaaaattaatcaatttgaaagaagctatgatataggaatttttaaaaatgaacaatcaatatataaatttattgaaaaaataccctttgtaaaaaaagataatagtaattttaattatacaaattactatatggaatttgaagatattcctgaatattatgaagtaaatttcaataattatttatatattattaccaggttttcattcattccagatggaactgagatattttttacttgggaagaaatccattattgggatgaaaaagttgctaccgagaaaacttttataaatggcgaaacattagtggattcatataactttccaaataatgaagtgaaagactacatacaaaagcgagaatcattatatatagaaacaaaaaaatattatgaagaaaaaggattaaaaattgagagacatgcactcggttcagaagatggtgaatatgttgaacttacaaatgattctatactttatttactagatatagaagcagttgaaataagagaacaatcaaaaaatatagaagaatttctatataagtacaaaaaacgttttaaataatttatattttaaaatacataacaatacattgagtcatttaacgaaatataaaatgactcaatgtatagactgataaaaataattatattattttttagttacatatttgttaaaaaattctttttcttctatcggtttagagaaataaaacccttgtcctacatcacatttaactgtatttaaaaattccaagtcttttttagtttcaataccttcacatacaacagacatgcctatacgatgtgacatttcaataatacactgaataatactatatactttctcccggttaaatgtttctttaagtaagcttttatctaacttcaatccattaatagatagagaacataaaagacttaatgaagagtatcctgatccaaaatcatccatcgaaattaaaaatcctaactttttaagctcctctaaaatcgaaataactggttgagatatttcattaaaagcactttcagttacctctatctctatatacttaaaaggaatttcatattctttaacagtatctaaaaacctttgataaaagctattttggtaaatagtaacccttgaaaaattaactgcaatcggatatgtatattgattttttttcataaacgttttttttacaaatgaacacgctttttttaacatataaaagtccaattcaataataaatccacttttttcaaacaatggaataaattcatctggtgataaaaaaccaagttctggagaaaaccatcttacaagagcttctgcgcttacaacatttaaagaagatatttgaaatttaggttgcaaatacatatgaaattcttcattttctatcgctttatacatataattataaatactattttccatttgtaactgttttaacagattttcattataccatactgtggaggaaattcctcttgttttacttaccttgtgtgcaatatttgccttatccattatagaattgatggatttataacctaaattatcaatttcaactaagtacgctcctatacaataagatatagtttgagttacattcatatctaattcagagattatagcattagttagcatttcccgaatatcctctaaaagagaatctctatattttgcaagtattacaaaattatctgaaccaattcttgcacaagtttctttgatattaaaagttttagaaagtgcagctgcaactattattagaactttatctccatattcatatccatgtgtatcattaatatatttaaaattgtcaatatcaatatttagcagtacatactctttgttagatgcattgtacaaaatttcaatcgctctgttttcaaatgcaacctgattttttatttttgttaaattatcagtataaaatattcttttaaacctttttttattataatattcccaaattaaaagacttattgttgagaatataagataaataaatagtgcagtagcaaaagaatacaattttgcattagagtgtttttcagatataaaaacaatttgattagacaacacagaatactcttcactcaatttatataatttatcacctgaagcaccatttctaacttttataatttctttcttcatagattcccacatagaatccatttgatttagtttttgttgaaattctttattatcacatctttgaaatccattttctccattacctgttcttagctttatcagaatattatccagtcgttttatcaagtcatcatttctttcattattcaattcttgcttaacaaccttttgagtttcactgcgaatagtaccagtgtgacttataattttaatatgctctatactatgatatagagaaaatataaaaaaaataataataactagccaaatagcagaataaattaaaaaatcatattttttcttcattattgttacctcatttgtaatatatataatttgcaaataatcaatctcttataaaaaatgattatcaatattttacagtgatatgtatttatcttaagtagtttaatcatttataccctataaattatacaaattcatcacctccaacacaaacagcaatatacgtttttctaaaatttctttttaaacattcatcaacactatcattaaatcatttttaaattgctcaattaatttactgcatcacttcttttcttataaaatatcaccccaataatatatttgtataatgtctttatgtctctttttaaatttggcatatacataatctatattttaataaataattaaaatactatttacctacaatttaactctttgaatttattttatcatattatgtaaatatattccttttttttggtatattacttaaattatatctatttttgtgcaataagaccaataatttacttatttcttattaattatatttaaaaataaaatttataaatggataataaattagttacatttatacatatatattataaatatataataaagctaaaaatatcgaaattattaaacaaaaaaatattttttaatgatagttatagtataaaaaatatactcactacaaatatagtatactattataaagtaatacttattcttataaaattccccaaggtcttctaaatttttgaacaatgaaaatagccatgtaactaataactgcagaatatctctgcatttaaaagttacatagctattttcattactagcaattatagattgctcttttaaatccaaccaatctttatctaataaaaaatttaatcgcactatatacaaaaggtgcaactaatataacactatcaaatctatctaatatacccccatgaccaggtattatctttccataatcctttatccctacatatctctttatagaagatgcaaataaatctcctaattgagctattacacttcctatacttcctattatcgctaattgaagcaaatcaatgccaaataaatatccaaataaaatacaacaaagtgtacttcctattattcctccaatagctccttctatagtctttttaggactaactttaggaattagcttatgttttccaagtaaataaccactaaaatatgcaaatatatctgtcataaaagatatcacaaatataagccatacatatatactacctttttcaaatccatttatagttataattataaaatctaaaaatactcctatataaaaaactcctaaaaacgtaatcgaaacatctataacattgtttttgcccatcaacatataaattatacttgctaaaaataaaataaaaattactgcataagtatattctaatggtaaattaaaaatattttttacagctaaataaatagaaaataaatatcctataatgaatattggatgtacatcttttattttaaatgccttataaaactcatgcaatgcaatataaactattgctgtctcagctatatatagaggaatacctccatatacaacaaatagaaataatggaaccagagctagtgaagcaataattcttgtaagcataaaataatctccttacttaagtcctccaaatcttctatcccttctttgatatacgtatatagccttctgtagttcttcttttttaaaatcaggccaatgtatatcagtaaagtaaaactcagaataagcaacttcccaaagtaaaaagttactcaatctttgttcaccacttgttcttattaccaagtctggatctggtatagactttgtgcttaaatagttttttataatatcttcatcaatattgtttatatctattttaccactttcacaattttttactatatctataagagcattttttatatctgctctacttccgtagtttaatgctaaatttaagttaactcctgtattgttttttgtcagttccttagctgagtttaattctcttatacaagtttttggtaaagcacttatatctcctatagcagttacttttacattgttttggtgaagttcagctatttcatttcttaagtatgtagataataagttcataagtgtgtcaacttcaagtttcggtcttttccagttttctgttgaaaatgcatataatgttaagtgcttaacacctaattttgagcattcttttactatatctcttatagtttctactccagccttatgtcctgcagttcttggaagaaatctagcttttgcccatcttccatttccatccattataatagcaatatgagtaggtatgttatttaagtctatatcatatataatgttgttattcatattttgcctccaatattgttctgactccttaaactaaggagtcagaaaagtatgtgattatcagttctacactatcacctatctcagatatttttataactctaggaactacaagtttttctttatcctttttaccttcaatagattttacggtataatttatattttgctcatcaaaatattgttttacctcatctacatgaagacctaaaaggttataatattttttcaatattatacctccattatgtccttttcttttttagataataatgtatctatttcttttataaatttatcagtcattttttgaacttcatcttgtgctttttttaattcatcttcagttaattctccgcctttttccatctttttaattttctcattggcgtctcttctttcatttcttattctaactttaaattcttctgcagctttactagcttttttagctaattcttttcttctttcttctgttaaagcaggtacagaaagtcttataacctcaccatcgtttgatggatttaatcctaagtctgagttagctatcgctttttctatttcatgcatagcagatttatcccaaggagatatcattaatattcttggttctggtacagatatagcacctatttgatttattggagttggagttccataataatcaactcttattttgtctagcatttgtgcattagctcttcctgctcttatagttccaaattcaaactttaaagcatcaattgtcccattcattttctcttctaattgcttatgtatttccagtttcataattttactcctccttcattcttcattattttacagtagttcctatattttcgccttttactgctcttattatattctctgttgtaagctcaaatacctttattggaattttattatccatacataaagatgtagctgtagaatccattacttttaattctttctgtataacttccatgtaacttaattctgtaaatttcttagcatctgcatgtacttttggatccttgtcatatactgcatcaacatttttagctagcaatataacttctgcttccatctcagcagcacgtaaagcagcagttgtatctgttgtaaagtaagggtttcctgttcctgcaccaaatataacaactctttccttttctaagtgtctaactgctcttcttcttatatatggttctgcaatttgtctcatgtctatagcagtttgaactcttgtagcaacatctatattttctagtgcatcctgtagcgccattgcattcataactgtagctaacattcctatatagtcagcagtagttctatccattccttcactggttctgcctctccagaagtttcctccacctactactacagctacttcaacacctatttcttgtattttttttatagcaatagcaatatcattaactacatcattatttataccaaaacctctttctcctgctaatgcttctccacttaattttaacaatacccttttgtacattggtttatccatcagaaacctcctatttcaatccttcatatccaattttttctattttttaaaaaagagaacacctgcgtgttctctctttggttattacttaagttgcttagcaacttcttctgcaaagttttcttctctcttttgtataccttcaccaacttcgaatctcacaactttaacaacttttatatcagaacctactgccttagcaacatcagcaactaattgtttaacagttatatctggatttttaacgaaagtttgctctaataaacaaacctcttttaattctttttctaatcttcctttaaccattttttcaactatattagctggttttccttcatttaaagcttgttgagttaatacttctgtttcatgtgctatgtattcagcatctacttcatctcttgaaacatacttaggattcatagcagcaacttgcatagctacatctttacctaattctaaaactttagcatctctagcttctgtttccatttcaacaagaacacctatttttccaccaccgtgaatgtatccagcaacttgtccattagttacaactttagcaaatcttctaaagtctaatttctcacctatttttgcaactctattatttaaaacttcttgtaaagttattccctctttatgagtttcacctaataaagaagctatatcttctttatcagtagctaatgccatacaagcagcatctttaacgaacactttgaagtcttcgtttttagcaacgaaatctgtctctgagttaacttctaccatagaagcaactgtattatcatcattcatttctattgcaactagaccttcagcagcaactctaccagcttttttagcagcttttgataatcctttttctcttaataaatctactgctttttccatgtttccttcagcttcttgtaaagctttcttgcagtccatcattcctgcgcctgtactttctcttaactcttttaccatttgagcagttatattagccattttttaagtttcctcctacttattctattccatattataaatggtaagggcgacccttaccatttaattgtcaaattattattcttggtcttcagctacttcttcctcagcaccttgtctaccttcaattacagctgttgccatagcaccagttattaattttacggctcttatagcgtcatcatttcctggtatagcaaagtctaattgttctgggtcacagttagtatcaactataccaactactggtatacctaatctatgagcttcttgaatagctatgttttcttttcttgggtcaactacgaacattgcacctggtaattcaggcatgtcttttattccacctaagtatttttctagtttttctttttcagctcttaattttataacttcttttttaggaagaacattaaatacgccttcttcttccattttttctaattctcttaatttatttattcttgtttttatagttttgtggtttgttaacattccacctaaccatctttcattaacaaagtacattccacatctttcagcttcatcttttatcgcatcttgagcttgttttttagttcctacgaataagattggctttcctgtttcagctacttctttagtgaacttgtaagcttcttcaacttttttaactgttttttgtaagtcgattatatatattccatttctctctgtgaatatatacttagccattttagggttccatcttcttgtttggtgaccaaagtgaacacctgcttctaataattgtttcattgatattactgacatatcttacctcctggttttatacctccagcttgatcttctccctaaaaaaccatgtaataggcaccttttaaggatcccaatgctgtgtgtgatttattttattttttcacctctagtagtatatcacagaggcgaagaaataacaatattttttccatattttctatttttatatttttttgtgtattttataccattttttgaatttaatttgcaaatttcatttttaattttgtttttaatgatacgttatctatactattattacttactatatctacacttccaagtaagtcacctgaactagtataatattttataacacccatagtatcaccttttttaacagggtactctatatttttaatcttaacttctgattttatactttcatcatcttttaatattgtataaagttcatcttttgcttttaatgtaacctctaactctttcattccttttatatatttcttaccaataaagctatctttatcaattacttttttcatattgaaattttcttttccatatttcagtagagctaatgaagcagaggttcttttatttttatggttagtacctaatacaacccctattactctacgttttttctcatttttctcatttttatttacaaccatagaaaatgataagcaatatccagcattgccagtatatccagtttttataccatctacttctggtataattcttaataatgcatttgtattgcttttttcaaaacttctatctgaatttgtatatgtctccatatcagttatagctgttacttgtttttcataatggtcaaacatgtattttccaagaatagctatatcttttgcagtagagatattttcttttgctggttttttggggttgcttaaatcgtatattggaagaccatttggatttagaaaatgtgtattactcattcctatttcttttgcttttttattcattctatctacaaatgcttctttcgttttacaaatatgttttgctatagcaattgccgcatcatttcctgatacaatcataagacctctcataagctctataagtggcacttcttcaccatctttaagtttataacttgacccttttactgatgcaatagatttgtctatttttaccttatcagtttcttttacttctttattttcaatagcttctattgcaagtaaaaaagtcatcatcttacttaaactagctaatggtaccttcatatcaggttctttactatataaaactctacctgtttcttggtctataagtatagatgtttttgaatacttgtctacagatttaccatctgcatatgaataatttggtattataaaaactagaatcatggctaatgatataattttttttagtgcatttttcaaatttttcaccttcttggattattaagtatatttatatttaaattttccctatttggtccaatttatatctagtaattaatacctatccatatttacacaaatattaccttatcattcttttaataatcacagatgcccaaattgctcctattgtaactccaaaaaatacttctatacctgccaatgctttcccaatcaaacttgtagcaaccatatctccatatcctactgtactaaatgtagccatgctaaaataccataaatccatatacattttgaaaatctcacttagtgagtaatcacctatattgtttatatctaaagctacaagtgtgctatttgaactttctatgcctacaaataagtataataaagcaaaaacacttattattgctataatcactaataatatattccatggcttttctccataacctgttgtgtaacgtgctatttggtcaaaaaatttttcaactaaataatcactgaaagtaggataattagaacgtttcattattttactactataaattctttccttataatagtaaaatcctatcatctcatattctccaatttttgttgcttgatttctagctattctataatttatcttgccatgctcatactcactttttccatattcaacattctttaacacaaattttgtacacatgctaaaaattattccatccattcgtggaaaattttctactttattaactaccaaatcaggtcctttaaatttcactttttcaaatatacggtcatttatatagtttttactaaatatggttctattaaaatcacagttttctaagaatatacaaccattaaataaaactttatctctaaattctgtatagttaaaaataatattctttttaaaaatatattttttaaaatttgctttttgtttaaatatggattcagaaaaatccagtattttataattgtaagttaatatttcttccgcattaaattcattttcaaaaacaaatccattaaattcacttatctcttctttatgaatagtatccatcatcaactgtatctcttcatcagacttattttctttatgaaagatacaatatccagaagaatctgcttctctatgacatttttttctctcatctatcttagatatccatttacaattcataaatatatatcctccagtacaaaacaattattactattttgtattagtttggatattattttattttatatacttaaatagttacaaaatatatattagattcttagttttaaatttttaatctacttcattgtgcttttaatttgtttcatataaaaaataataaattttatatactttgatttatttatatattaaatattattctaaaacttacttatcatttttaagtaattttgtaactatatttaatgctactaaatcatccataaatcctattgggaacacgaagtctggaatcacatctgttgatataacaaagtaaagtagcatacttccaatcaataaatatttctttattgtaagtccatctgtacaaaaatcagcatacatttgtcttaatctatctgtaaattgaccttgtttttcaatagaatctatttttttattaaaattatcaaaaagtaattttttaccttcatctgtttggacatataacttacacttacttaactctttttcaatatttccattaaagttcttatcattgattaaatttgcaaatccaagaatatcatcaaagttactaaaatcactatctgcattaaatatttgattattgctgtttctaaattcatatcctgaagctttcaacagttcttctaggttaatatttaaatgtattgccatcttttctaaatgatttatatttggcctttgtttattattagctatacgagatatagtagatttatcaattccactttttttacttagttctcccattgataattctttttcatctaataaaactttcaacaaatcaccgaaattcccaaccttactatgttgttccattattttcacctgctttattatgattggttttatattatatgatatgattcttttgttatttaggtgttgtatgatgttgaaattttatcaacaatttattggattatctgtaacaatttatccatttttacaatactataactaatataagtacaaaatttaagagaaaggatgttaatctactgtgattgaatcaattttattagttacttctctttgtatagatgcctttgtgacaagctttggatatggagtaaataaagttaaagttcccttatattcaaatataattatcagcgtagtttgttcagctattttagcaatatcgctttttgcaggtacaatagttagagattttttacctcaaaatataacaatgttaatatgtttctttattttatttttattaggaagtgctagactaattgaaagtttttttaaatcttattttaagaaaaaatctatacactcaaagaattataattttaatatgttagaccttgaattaaattttaatgtaagtatcgaacctgatgtcttagatacaagtaaatctaaagtgcttaaatctgctgaagcatttacacttgcacttgctttaagtttagatggattagctatcggttttggtagtggccttgtaggtgtgaattatatacaagttattctattttctttaatatcaaatataattgcagtattacttggttgtttactaggaaatatgtttgttaaaaacgtaaatttaaacttatcttggttaagtggtttaatcttgttagtcattggatttatgaagatatgttaataagaaagcaatctaaagataaacttttctctttagattgctttcttttgtgctttttatatttattttctattctctctaatttctttctgaatctttttaagagctttttttgaacctctttgaatatctttttctaattttctttctttaaaactagtaaataatacatctaaatcatacccttctggatacaattctgatgcttttatgctaagttgtaatctttttatatttactgaaataaaattatcattaaacaatacttctacattattaaacttgtccataggcttatatacaattccaaaatcatcttcatctagtaattttaccttatcccctacattataatctgtatagcttaaaatgacttcagaactatttttatcttcaatattagattgtagcttacttcttttaactaaatctaaattgtagtttctatcaattacatattctttagctctatctaaaactctattttttattcccatttttttagaaataaaaagagcattactatcttcagattttccaatagttaacttatacaatggttctaacgtttctttatcaaacatcataccagcattttcaaattctggatgtaatgtagcaaacttttttatctctccataatgagttgatgctatagttatacatcccattttgtaaaactcttctaataatgatattgctaaaccagctccttcattaggttcagttccacttcctatttcatcaaacagaacaagagtagaattatttgataaactcataatctctgcaatattttttatatgtgatgaaaaagtacttaaggcattttcaatactttgattatcccctatatctacaaaaactttttcaaatacactaaattcactaccttcttttgcagaaatatcaaatccacattgaaccattaaagttagtaaaccaacagtcttaagggttacagtttttcctcctgcattaggacctgttattataagacttctataatttttgcctatttcaaaatctaaaggtactgcatctcctgttagaagtggatgtttacctttaattatttttatatagccattattatttatttttggagtaattccttttattttttgactatacttagcttttgcaaataccatatcgtattctgaaagtatctctatatttaattttatctgacttatcttctcaaatataagttctgttaaataagataatattttgtattcttcaatagtttcatcagcttttagcatagttaactctgtacttaaatttgaaacactaataggttcaataaatacagtatttccttttgatgatgtatctaatatagtaccattaacttcatttttataagaagatttaattggtattacatatctatcatttcttttacttattataaactcttgtatatactttttatttacagttgatgttataaatttatttaatctatcttttatctttccttctgtaatttctatatttcgtcttatcttttttaattctttactagcattagaatcaactttattagattttatacagtaatttatctcatcttctatacttttacattctgttatatttaaagcataagaacttaatgtaggtgaataaaattctttttctaacataaaagctttcatcttcctacaacctcttaaaaaatcttcaatatttacaagttcaacaggttctattatcattcctttttcaattttatctattgtagaacctgcattaaacaatccttcaagtggtatgtgattactattttcaattatctttctagcttctttattttctgctaatttccttcttactactccaatattcccactaggagttaatttatctattaaattttttcctagcgaacttacacaatgtatttttattaagtctttaacttcatttagttgcaatctttcaaatgtattactattcattattttttctcctttatttataagtcatcgtcttttaaatcaccctatcatttactttgataatagttattttgcgaacaacttaataaataaggagttattatatatcaaactccttatttattaagaagtttaactccggactcattaatgttagtattttttttcataaaacacttctccttttctattcttatttaaacacttataccagtgcttctaatattattccataaattatatatttatgtcaataaaaataatgttattaatgtttttgtacagtgaaaatttttatagtgaaaataagcttatactttcatttatattttggaattacttatattgtcatcaattcatgtatgtgtagtttccaatacaatctaactttgtaatcattatatatcaaagaatttagctctataaattatcgtctctataaaataaaaaaatagctaataataataaaacacttttaaatgttccataaaattagctatttataatataattttaatcttttttaactttaaaaattatcctttataagtaatcaatggcttcatagttgccactacttgaataagttcatattctatcaaactttcaataatctgctctatattcttatatgcctctggagcttcttgaaataataaatttacatcattacatataatctgacttttaaatttagtttgttttatagtatctttactatacttacttttaaggcgcgatttacaaactgaacgagaccattttctacctgctccatgtgatagagaatataaagatatctctgtattttcagtaggcataactatatatgatagactgcctcttgaacctggtataatcacagctcctctttcacttgaaacagcaccttttctatgtataaatttatcttcccttttctctataaagttatgatttatagagaatattgtttcaacatcttcagatgtacctattgactgcataatttttttactgatagcttcacgattacgctctgcccacattaaagcattatcatgttttttaatataatctattgctttctcactttcaacttcaagtccatctttatcataaaatttttttaaaatatcttctccataatttcttgacccacagtgaactaacatcataatatcatcagatgaaaattttaattgttcaaattgttctttattataaatttcacttatacattgaatttctacaaaatgatttccactccctatagttcctaaatttaaaattggacattcttctttatatgtgttttttatttctatatcggacaaatctttaatcttactaagtgacttaatccatttgtcttttttaaatttcttttttagaaccccagttttaaataaagtcattccgcatcctatatcatttccaattatatgtggataaataatatttttagtctcaactgctaaacctacaggtattttacctgtatgtaagtcaggtaatcctactactcttaaaattccatttaactttgaaatatcttctagttgtttccttgctatatcttcaatccaacatttattacttgctattatttttatattgctcataatttgctcctttttaatattctcctgcctttaaaaagtagcaaaaagctgtgacctttagccacagcttttttattctaaactgtaaaagcaggtggctatttgttaaaatactcctagacgtttaatacctcattattttttgttaacataataaccacttcctttcataatttaagactacactaaaatttctatgtatatcatttatagacattgattttaaaatacttaatatacaatttttatattatggaactaataataatcattgaaatcatgactatagctagaccggcaacaacaagttttttatgtaatttttttctcattttacttttatattcttttttaacttgtataactttgtcttgtttctgttcttcttctttctcatcttcaacttctatatatgctttttcatacattactttacttaaatcaataataatatcattggctctagtatacttattatttcttccaagaagcctttttataacatttataagttctgtatttccattaattgcttttatactattccaatctaatcccttatcaatagattgtagcattttttcttctgaatttgattctccaaaaggcaattttttaaatatagattcaaatagaataagacctgttgcaaaaaaatcactttctttatcagtataatttatacatagttgatgtgggcataaatatctcctgtttccatagcttcttgtattaaccccattatttgcttttgtaattccaaaatcacaaatttttatattgtattctgtatctactattatactactcgattttaaactaccatgatatgaatgattcctatgtatcatttctaaagcttttaaaacttgtatcattatgtttacaattgcttctaaatgaagataattacctagaattaattcatctagtccgataccattaaagtcttcacttacaacataatataatgttgtttcttctgtacagtgaatcccaacatctattatttttagtatataaggagagtttatctcatctaaagcagtactttcatcaattaaatttgaaacaaaatcttcacaaatataattattgtgctttataacttttattaacacatttctcctgtaaaaaacatctctagctttatagattttgttaatttctaaaacgtcatcagaatttactacctcatatctattgcctataaaattcaaccatgtcacctcctcatacattttatataactaaatctatttacaattataccaatatataggaatattttctatatattaatgattgtaatattaaaacaagaactaatagtgttaatttttacaaaaaaggctgtctcaaaatagagatacgcttcttttgtattgttgaaatgatgaaaatatatttgatttcacataaaaagagtgtctcataaactaaaaagttcattttgagacactcccttttatattacaaatatttctctaaaaaattatctatttttttaattctttataagaactatttgatatatgttctttttttatgacctttccacttgaatctttaaatattcgatatgtagaatatttattctgaccagtttgttttacctctatagatatatttggtttgtcaccagaattaccatagattactgatgatacacttcctccacctgcataatttttaatatatacaggatgcttatatggatttttaaactttaagtttaatcctccatcgctcacagtagcatctcttcctttaggcacataagtagatgcagatgaatgatttgtaacttgagttatctccatacccgaaagaagagccgcattataaactgttgaagatgtttgacaaacacctcctcctgctgattgttctagcttaccataaactataacaggtgcatctttgtaaccatttgctttattactaggtcctgtaagtttattgtatgaaaattcttcacctggcattaataatacatcactagtttttcttgctgataatcctacattatatgacctaccctctacagcttgtgaataagtagttgaatattgacctataacagaatttacagtttttacttgttcagttgttatatctggtttttgaagatttactttaagttctaaagttttatgctctttattttttatcatattatatatagactctttatttgctgccaaatcaaattctctacctacaacagagtctgtataacttagtccaccacttccaacactaatagaagcatttttcatcttaacatttatactatctgctattgaagacactttggaactaagttttgcctcatcatattcagcttttatcttcatatttgccttattcactcttatatcaatatatttttttaagttttgaaaataggaccctttttttgtactttcataagcatcttttacaacatcttctgtatcatattttaaatcaatatcttttggtgatattgtatattttttcccatcataagtaagatttaagtcttctggagtatacttatctgttatagcttttaatgcctctgctttagtcatatcagatacatttactccttctatatatacatttttagcgattttcccattgtacagaaatttactgttaaaaaaataagtaaatccacccattattagaactaaagctgccaatacaattaaaacacttcgttttttttctttacctaatcttgaaactcttgttgttcttctgcccataacttcacctcattttgacactagcttaaatttgcataatagagttcccatttcaaaactaccttagattatatttgaatagcttttgttaaacaaggaatttaatcaaatgtaactttattgtaaatttatgtcttataattagttttatttttgatattttttattatatttcttttactatttcttaacaaaaaattgtttattttataacaactaatttcatttatattgaaatttaaatgtaacctattacaggataatggtctgacaggtaaattttttctactgtgtatccttttaattcagtatttttattaacaaaaatgtaatctattctagagtttgatttttcaaatgttggtaagtaagacttgtttagtgaaatagccatatcattaaacatacttaaaaagacatttttctcattaaaatcaccacataaaataactatccccactaatctgttcctatagtctattatttcgtctaattgttttgctctctcctgcctatcaagtcccaagtgagtatttattacatttataattcttccatatgcatctatagttatacaaagagctccccgttgttcttttttgctagttaagaaaaaatgattactgtttaacattttagatgttgtaaatgtacaaataccatatatcatatttactttttttacatttgtagcaaagacaccatccatatttaaaacagcttttaaagctaaaaattgaggatataatacttcttgcaaacaaattacatcacaatccaattgttttaaatataaccccattttagttagagttaatctattatttgaatccatacctttatgaatattgtaggttactattttcataataatatcacctcttatgcaatataatacttactaaaatttaaacttatttacttttcacttaagaccattatttatcttataaaattgagtacttataaactttatcacaaaaaaacctaacttaagtatttatattctacataagttaggttttataaactattataatatttattatttcattcatttctaatgatgattctccttttttatctttttcaatttgccttcactaacaacaaataaaaatcccatcttcttgtatatttcatccaattcaattaaagttacttcaccattttttaaatttgttaatgttatatcttgtattcttcttgatggaattatcataagttatcaacactcctttaaattctttttaatctttatatttaaatatatttatgcattctgatatatattcataaattattaaaataaattcaaaaaacacccgttctgcaaacattcgttctgtatatttattatacatcatacagacgttcgattcaatataaaaattaaatatatctcgtttttagtaaattttacaatattatacactaaatatgtcaaaacatcttcttgaaatagattatcttgtcaaacaaaaaaaaccatttcagtaaaagcttctgcttaaattgaaatgacttttcttatttaaattattaattttataccatatttttattaagctaacatatgtaatatttgagttaccacaagagcacaataagtccctataatatttcctagaagccccataagtacacctactggtattaatacaggattgtgaaccccagcaatcattggagctgtagttactcctcctatattagctatacttcctacttcacaagtaaataaatcaagtttaaatagtttagcaagccctataaatgaaatagcatgtacaaggactactaccaatccaaacattatgtaaacaggtgcttctgacaatccaaagaaatttgctttactacctgtagctgcaaggagtaaatacataaacacatttcctaccagtgtactccctttaagctttgatatttttgtcatacccaataatattgatactgtagatgcaacaagtactacccacatagtttcattaagtatacctgaagttggaagtatcttggatacaatttgtgcaaaagacgcaactccaaacccaacagaaagtaaaatcataagttctacaaacgtaggtgccgtattatctttattttctttttcaagttttgatgtaacctcatctataaaacttgtatcgcactttgtccatttgttaaatttaggtccaaatttcacagacattagacaaacagacatccatactgtatatcctatagaacccataagtattgcataactaagtccttcttctgcaactcctagagcattagctgctgcaatcatatttgatgagccacctatccatgaaccagatgctgccccaagaattttccatgaatctgcacccattgaatttttaaaaattatgaatgctataacaaatccaagcataaatgtaaatgtagcacagaaaaatgataataacattttaggccccatctttaatatttttcttaaatcacattgaattaacaagaacactaacattaatggaaggaagttcactgttattatgttttgatacgttccaacatcttcattctgtgcaaataaaccaaatgatccaagtatagctgaacctaagtatattaaaagcattggattaataacatcaaataccttccatttcaatttatcaaccataaaaaaaattacacctacgaatacaaccaagaaactacaatatacaaatccagtctcaatcacattatacacaccctttcttttcctaattaatttgatttttatgatttctaagtaaagactttttcagataatagacaattaaaataaatacttttatctatatcatgctaattaaatacatatatacctaactattgacatatattaataaagatttgcacattaattactttagaaatgaataatctgaatttaaaatctttttcaacaattattttattactaaaatttttatttgtaaagataattaaactaaatattttattatttatttattttgttttgtatttatttttattaattattaaataaaactatttttactttaaatctatataatataaatcaaatttattttatatactttttttttaaatatgtttagattctattcttttaattttagttttcagaacatttgtatttatgttataatttgtataaatatatttatttaggaggaaacaatatgaatttaaatttaactaatactataaatttaatgaaaaaatatttggacattccaagcccagctggatatactgaaaatgcagttttagaaatcaaaaaagattttgaaaatttaggtcttgacactattcttacaaaaaaaggtgcacttatagctactcttcctggtgaagatgattcaaatcaaataacaatatctgcacatatggatacacttggagctatagtaaaagaaatatcatctgatggtactcttaaataccataaagttggtggtggatgttgggcagctatagagggagaaaactgcactgttataactagaaaaggtaaaaaaatcagaggaagtgttgtatttaagtatgcttctactcatatatatggtcaaacaaaagctgccactgaaagaaatgaagaaacaatgattattagacttgatgaaaaagtatttacaaagcaagatgtattagatttaggaataagtgttggggattttgtatgcctagaccatagatttgaggctacagaatctggttttataaaatctagatatatagataataaatcagctgtagcaatggttcttgaaatatgtagatattttaaagaaaacaatttaacgcctaagcatactactaacttttatataagtaattatgaagaaattggacatggtgtttctaaatgtttacctgaaaaaacaaaagaatttgtagcaatagatatagcacctactggaccaagtcaaacatctagtgaacatggtgtaactatagttgcaaaagataatttatcattatatgattttaatttaagaaacaagcttgtcgatgttgcagaagacaataatttagactacgctgtcgatgtatttactttctatggttcagatgcttcagaagctattcgttggggagaagatgttcaaatagcatgtgttggtcctggaacaaacaatagtcaccattatgaaagaacacatatagaagctattgaaaatacactaaaattacttataaattatatgcttaaagaataattaattatatattttaccaaagtcaattcttaacaaataattaactttaatttttatttttatacaaaaattggtttttctatagacttaatttcaatttactactattatataagtaacttcaattttctttagttaatttttattataatttatataaattgtataaaaattttcttcagttacttgttgttaaattaaatttttacaagctaaccctaccagaaaagagttatctaatctgtaaggaaatagtttaatatagcacattatacttgtgtaattaataacttttcttttgtagaaacttttctttacaaagaaaagttttttgattttggatttgtttaagacatattttctgagttaggaggatatttatgaaaaaggttgcagttataagtgctattttggaagagccaaaagaatgtcaatttaaattcaatgaggttgtatcaggttttaaaggtattattaaaggaagaatgggcattccttgcgaagaagaaggtgtctcaatcgtatgtatagcagttgttggcgaaatggatactattaatagtttgactggtaaattgggcaacatacctcatgtatctgtaaaaactagtatatcaaaaaaagaagtttaaggtggtgagtacaaatgagtctaaattctactccacaatcggtaagagtacatataggtctctttggtaaaagaaatgcaggtaaatctagcataataaatgctataacaaatcaaagtgctgcaatagtctcagatattgctggaactactacagacccagtatttagaccaatggaaatccttcctataggaccttgtgttcttatagatactgctggtcttgatgatgttggtgaacttggtgaacttagaataggtaaatcactagatgttttagaaaagacagatatagctttactagtagtggattgccaaattggtatatcacaagaagatttgtcactaattgaaaagtttaatgataagaatatccctcatattctaattctcaacaaaattgatactattaagaatcaatcagaaattttaaacttaactaaaaataaagttaaatgtccagttgtttctgtctcatcaacagataaaattggaattgaaaatttaaaaaatgaaataataaaagttttgcctaaggatagcactgagttcaaattggtatcagatttaattgaaccaaatgatttagttgttttagttgttccaatagataaagcagctccaaaaggtagacttatacttcctcaacagcaagttataagagatattttggataatggtgcaatttctatagttacaaaagaagatagtttaaaagaaactctatctaatttaggcaaaaaaccaaaacttgttattactgactctcaagtatttccacaagtaaataaagatacaccaaaagatattcctcttacatctttttctatattgtttgctagacaaaagggagaccttaaagaattgattaatggagcttatgctttagaaaatttaaaagatggtgataaaatcttgatggctgaaggatgtacccatcatagacaaactgatgatattggaacagtaaaaattcctaatatgattagaaagaaaactggcaaaaatattacttttgaatttagttctggagtatccttcactgaagatataaataaatatgcccttgtagttcactgtggagcttgtatgatgaatagagctggaatgttatctagaatagaaaaggcaaaatctttcaatgtacctattgtaaactatggtatcttaatagcatatgtaaaaggtattttggaaagatcacttgaacttttcaattattaaaaatttaactatacttaataattacatatttgaatatgactaaaaataagattaaatactttatagataaactttacagcattaattcattaagttttgatgaactactatatttaatagaaaatatcgacaatgaggaatataacttcgaacaaaatttaagaaactatctttataaacaagctagcgacatgagaaataaacattatggaaatagagtctacttgagaggacttatagagcttacaaactattgtaaaaataattgctactattgtggaatacaatcttctaataaaaatatcataagatacagactttcacctgatgaaatacttgaatgttgtgatataggttataaaataggatacagaacattcgttttgcaaggtggtgaagatgcatattttactgatgataaaatatgtgaaattgtttcaagtataaaaaataaatatgaggattgtgccataactctgtcactaggagaaaagagttatgattcgtataaaaaatactttttatgtggtgcagatagatatcttttaagacatgaaactgctacagacagtcattataaaaaattacatccgccaaacattgagcttagaactagaaaagaatgcctaaaaaaccttaaagaaattggttatcaggtaggtgctggatttatggttgaatcaccatttcagaacaacaaagaccttgttcgtgatttattatacctaaaagagttaaatcctcatatggttggaataggaccttttattccacaccatgatacaatttttaaggattataaacatggagatttagagaagacattacttatgctttcaattacaagacttctacttccaaaagttttattacccgctacaacagccttggcatctataaaccctagtggtagaaatgcaggtcttttagctggttgcaatgtaattatgccaaacctttctcctcaagaatttagaaaacaatattctctttacgataacaaagcctttactggtcaagaagcttgtgaatatcaccaaagtttagaagaaaacatcaagtcattaggacttgaagttgactattctcgcggtgataatattgaatggaggcgtttgtaaatgttcataaaccatgaacttattaattctttattagaagatgcaaaaaattcaacttctgatgatattgaaaaggtacttgataaggctgatagaagggaaaaacttagttataaagatatagctacacttcttgaagtagaagataaaaaacaactagatagattatttagtatagctgggcaaataaaaaatgaaatatatggtaatagagtggttttatttgcccctctttatgtatcaaactactgtgtaaatgaatgtgtttattgcggttttagtaaatgcaacaaatttaaaagaaaaaaacttaccatggaagagataaaggaagaggttaaaatattagaaaaaatgggtcataaaagacttgctctagaagctggtgaagaccctaaaaattgtgatataaattacatcttagattgcttagatgcaatttattcaacatataatgaaaacggaaatataagaagggtaaacgttaacatagcagctacaagtgtagatgagtataaattactaaaagaaaaaggaataggaacttatatattattccaagaaacttatcacaaaccaacatttataaaaatgcatggtcaatctataaaaaatgactattattaccatttaacagcttttgatagagctatggaagctggtgttgatgatgttggtgcaggagttttatttggtttatctgaccctaaatttgaagttctaggacttatgatgcacaacgaacacttagaggaaaaatttggtgtaggtttccatactatatctttccctagattgaaaaaagctgaaggtatgagcttagaagattttcctcacttagtttctgacgatatgttcaaaaaaatagtagctataactagattggctgttccttttactggaatcataatgtccactagagaaactgctgaaatgagaaatgagttactaaaatatggtgtatcacaaattagtgcaggttctctaacaggtgttggaggatataaagcatatgaagatggtgacaatacagaacaattcgaagttggagaccatagaagccctgttgaggtgcttaaagaactgattactgatggatatatacctagttattgtacagcttgttatcgtaaaggtagaactggcgatagattcatgagcttagctaaaagtcgacaaatccataatgtatgtacgccaaatgctcttactacattaaatgaatttttaatcgattatggagatgaagaacttaaaattatgggtaaaaaacttatcgcagaagaaataggtaagatagaaagagaagatataagaaacatagtatctaacaatatgactgccttagagcgtggagaaagagatttatacctataaaattttattacttatatattatttattgtatattccataggttagtagtaatattatctaaagggaaagtttaagggagggagattaacattgaaagataacaacaataccaataaaactattcaatttggagaaaaaaaggctagcctggaaaacaatattcaaaaaaataaaaatatcaaacttgataatacacacaaagtcattccttaccctaaaaatagaaaaaaggatgataaaaagaaaggtaacaagaaaaagaatacaaatacatctaaagtaaataaaaataattatggccattcttttttcaataacaaatacaaatataaaagaaaaccatatgttattgctttatacacagtaattcttattcttttagctatcttaattataactaaattaacagatagtacgaataaaggtaattattctcgtaatactgtctctgatactcacaaaaacgacatccgaaatatagtctttaatgaatcaaacaattttcttatttgtgggtaacttaaaagagttatctcatttcagaaattactttctaaaattgagataactctttttttcatttaatatttattttaccaaccttgagttacttcatatacttcatcaccaattctaccatttaaataatcatctattgcagaatctatgatgctcattgctttatctacttgctccttagttattactagaggtggttgtactcttaaagtagattgtcctaagaatatcattattaatccagtttgtatacatctataacatatcttagctgtagcatctggatgtttttcattagaaccttttcctttaactatatcaactcctatagataaccctattcctcttatttctccaattatatcgtatttttcttttagtttttcaaatcctgctttaatataatctcccatttctatactcttttgaagtaagttttctttttcaattatctctatagattttaaagcagcgacacacactgttgtatttccagctaaagtaaataaatgtgctggtgcatcaagactttgcattatttctgttcttccaacaactgctcctaaaggtaatccacctccaacagattttccaagaactataaggtctgcttcaacaccaaaattttctataccaaaccacttacctgttcttcccataccttgttgtatttcatcacttacaagtaatattccattttctttacatattttacttaaaccttgtacccactctactggaggcactattattcctgcatctcctgcaattggctctataaatattgcagctacctcttctgctggtagatagtgtgcaaaagcatattctatctcatctaaacattctttagctgttctatttttatcaggataatggaagtgataaacttctggtaacaatggacccatttttcttctcatatttgtacttaaagcagatatagatatagctccataagtacttccatgataagattcacacatagatattatctttgttcttccagtataccctcttgctaattttatagcagcatctatacaagcagaaccagttgcactgtatagtacttttttatcattatctccaggggctatttccacaagcttctcagctaattttacaggaggatcactatggaaatatgcaagtgtatattgtgttatatcatccatttgttctttaactgcttgtgagatttccttattaccatgacctacatttgcagagcctgcacttgctaaaaaatctacatattcattaccttcataatcatatagcattgcaccatcacctgatttaaatgctactggataataaggtatcttttgagttttagcaacatattttttttcttctgtacttatcatttgactagttatctcgctcattggcaaatcatcccctctttaaataaatttatgttctaaaattattgcgatttataaagatattctcatataaaattctttatatacttaatgttagtatttttgacacaaattgtcaatatatgtttttataattttcaaaatatttgttatttagaaacaatatattttatttttatcaaataaacattatttttcaaaaaataaaggactctattctatttttatagagtcctctgaaaataatcttataaataccattattctattcgtcttcattaaattgtataattaccttttctcattaataatttttttaaaatgttctagttgctcttgttgttttttatgttttatatgtggaaatgcttttataactcttttttgtaaaataatattagactctatacggtccaacttactatttattttgtttattttttctctaacttctaatccgtcgttatttattgttttaaataaagcttgtatttctcctctatcaaatttatccaatttcacatttatatcattaaggtctgtaattatatcgtctagtaagtttaactttatatctaattttttaagtgttataatagtaacaatcaaatcaagtatagtccaaagtgttgtaattatagccattgaaattaatattctatatggaattatacttacaaaatattttataaatggatgtataaatcttattattaaaacagacattacaccaaagtatattgcattttttaaacatactctaccctttatattgaattttctgtcagaataatcccaccatttagcatgaaataaggtttctaaaataaatcctgtaaaatattctagtatcgtagttaaaatcattcctaatagaaatactattactacattattaaatcttcctaatagtgatatcacaattactgctccaaaaccataaacagggcatattggaccatttaaaaaacctctgttgattattcttttgcttgctatagaacatcctatactttctactgtccatcctaaaaatgaatatataaaaaagtacaagatatattttattatctccataatttatctctactccttcactaatgttcttattttatgcacaacgtaaaaataattatagaaatagttttttcgttttttatatttgttattcttttattcttgtttaatattttattcatacaatccaattaataatttactagccataataccatgtttatcctttggctgattttctttatcaatccaaacattaatagtatcatatctccttaataaatctaaattcttcacatcaaattcctcatatttaactatatccatttttgattctttggtaattatataagatactaattttgtattttcatttaaataaattcttatatttccatcagaatcaattaaattctctggtctctttactttgttattagaacctgctttaatagttattattccttttttaaagctctcaaatgtcccaactatatctactgtatctttatttatatctttaattatttccctattttcttcaattaatatttttgatatttttctatcaggtctaaatttaaaagttagtaagttatgataatttttagaaataactcctaatcctaaaactcctaaaactaaactagtagctattatagccttaaatcttttaatatcattaggaaataatttattcatgtttatgtaaatattaattccaattattccacctaatgaatttaaaataacatcatctatatcactacttccaagagcaaaaatatattgtgttaattcaaatgctaggctaacaagtataattactataattatagtttttttatttagatttttacatactataggtaaaaaaattcccataggaataaatatacctatattttctataatatttacagtagctttcataaagtcaagattactatctactataaattgatatattgtataaaatggaattaaatttacattcctaaacgttcccttgaaaatagcgtaaattggtacatctctaaataaaattattcttataatcattaaaatatataccaaaaatattatgtatataattgacagtaacaatttttctgactttttactttctatcactgataagtctcctttcgctattaatattttaagtatatcaataaatatttaagacgattttaaaatttccttaaaatttccttaattttcaaacaaaaaatcaaaaaagcctacacttaaatgtgtagactttaataaattttcatacaaatacattttattgaataacgaacaatcttaatgtagaaaaaactataactacagttaaaagaagtctagcatataaaaaatttttttctttcaacataactcctgcaactccaaatataaaaaatagagaagcaataaattttccaataagattattattaggataataactaaaaagcataaaacaaagtacaaatgtaagtactcctattgcattaaacacaattttattagatgctatttttcctttattgaaaaagaaacagaatattgacactaaatctaaaaataaaaatacataaaacattccttttaaaacgcccatttttataccccctaaaaattctaattataatatccagtttatttcatataatcgtcaatataatcaatactttataacatcagtataacagtattacaaatttatattacgaatgtattacttcgtattcatacatattataatcacactcatacatatttaaagactcatatgttgcttttgcatttatgttttctttttctacatataatctcattccaactatattttcatctttatcacatatattttttatataattaaataaataattaaagataccttttcttctatattccttatctacatatacactctgaatccaaaggaaatttccatttctccaatcactccactcatatgtatacataatctgtgcaacaactttatcaaatactgtatatacatgatattttccttttctctcatctaataacaatgcttttacacctttagttaaaacatccatatcaagttcttttccttcagtttctttagccaaattataattaaattttgctattgtatccaaatcatccatacgtgcttctcttatctctattagttcttcattttcatataactctatgtagtccttttgttgctccatacttattcctccatatctattttatctactaaggttttttatataatatatttatagagttttttctatcttcataaatgcataatcaagtgtagcctctaaatttccattattcttacctcctccttgagctaatactttacttccaccacccttgccatctataagacttattgcatcctttaataaaactcccatattaatatcttttaaatttttagaacatgcaaaaactaaatttattttatcattaaatttaacagctaataatgcaatactattttcatattctgcaattttatttgctatcttatttacatatttcaaatcttcatcatcataaatttttttaatgaccgaaatattgccaaccttatttgctttttcaatcatttctttgacctgatatgtagatactacttcttcaagccttctttttttaattaaagcctcttccactttactatttagatttacaataccatttatagcatcttcctcactacagcttaaatatctacatattttagtcaaatatatatccctcttcaatacttcatccactgcccttttacctgctagaaactctattcttgtacttgacttatgtttttcccatttctttatttttatcattctcaattcaccagttgattttggatgcactccacaacatgcattcgtatctaaatcacctatttttattactcttatctcttcatcagtatttggcaaatcacgtcttaaccaaatcttttttagttcttttttcgttggaagtaatgtctctacttgtatattttggcgaataatttcattggcaaacaactctatctctctaattttgttctcttctaaattaccttctatatctactgtactatactcatttcctaaatgaaaacctgtcgtatttgcattaaaagttttaaaaaaacatccagataatacatgttgtccaaaatgttgatgcattccatcttctcttctatcccaatcaatactacactttaccttatgtatctttataggttttttatctaatacatggtatatattttttccatcttcatacacatttattacatcatcattctctatttttcccaggtctccaaactgacctcctccaccaggaaaaaaagctgtcttatctaataaaacatgatacttattttctacttcttttatttcaattatttctgctgtaaaatctcttatatactgatttgtataatataacttttccattataattctatctccattttcttaattatagactactttactttttaaatacaaatttcaagctaagcttaatttaattgtattaaaatagaactcatcctattatttactaacatcttctactatattttaacatatagatattagtgttaacaaatttataattttatattatttcaatattttataacaagtatgcttacttattttcttatataataaaatgtatattaaaacatattaaattgcaaaataagcttcaatctcttttactaatttcatccattattaatgattttgaaatatacattgcttctataatattcttaaaacgtgtatgatgagatgtctcctcagaaaatttcttctgtactttttcacaattaataatccttgaagatgctactctcagtacttccatcaactcttcttttgtatgataattcataacacatttactcctttgttttttaatttagagaaacagtatacctcaatttaatatcattatcaactgatatcattattatttatatatatcttttaacacttaaatattctaactatcagtgacattacatattttaataattattaatatacatataatactttaacattcattaatagagagtatattaacattgcttttttaaaaattttagtataaaatcatattaaataaattttctgaaataataaaatattaaaatatccaaaaacagcttttgataacatctataattttcaatgtatcgttattttagggggagtgatttaaaatggcaataaagccaagaaaaatatctattgtaggttcagggcatgttggttctcattgtggatttagtttaataactcaaggagtttgtgatgaactctttatgattgatatagatgaatctaaatcaaaagctcaagctttagatttagctgatgcagtttcatatctaccacataaagtacatatagaaaaaggaactttttctgactgtaaagattctgacatagtagtgataagtgttgcagactcttcagaagggcctttacgtagacaaaacacaactagattagatttactaagaccaactattggaatgataaaatctatagtaaaacccatagttgattctggctttgatggtatatttgtagtcatatctaatcctgttgatgtagttacaaattatatttgggaaaaatctggctttcctaaaaataaagtcattggaactggaacagctttagattcaacaaaacttagaaggattttatctgaagaaactggaatcgctcaacaatcaattcaagcttattctatgggtgaacatggagattctcaaatggttccttggtctcatgtttcaattggtggtaaaccaatcttggacatgataaaagacaacccaaatacttatagcaatttagacttaccatcaatagttgaaaaaaataaaaaaacagggataagtataataaatggtaaagattgtacagaatttggtataggtactgctttagtagaaattgtaaaagctatactacacaatgagaaaaaagttcttccagtttctacattactagaaggtcaatataacgaaagaaatgtatttgcaggtgttccatgtgttataggaaaagatggtattgaagaaattattgaaatcaatatgactgaatatgagcaaaacgaatttaataaatcttgctctgttttaagagaatgtattgcactttcaaaaacactttagattcaatattctttcttacactaaaagcaggtaaatgacttattgaaaagacttttaactaagttaatgtttaaatcatttatacctgcttttaattttaatactaaaatataaacctattttttaccatcaaattttataactttactttttttatttacctcttgagataacaatccttttttcaatcccatcaataattctaagtcttctggataaagatttattccaaattcctctaaacttgatactatactatttacactcattattttattttctatcaataattcaactgctctttttaaatacgttgggcttgaacctttcattttgtctagtggttcttctatcaaccagccttttttatccatttcattcataagataattgtattttttgtaatttatcttttctagattatatgctctaaaaatcatagcagatataggtacaatccattttttctttagttctacataataatctaaatcttctggatgagtcaaatcttttaaaaaactctcttttggcaataaaaatgcacaggcatactcatcttctgaaaattgcttacttggtattcttaattcacttgatattatatatccaagctcacatgccaaagtataatttctaattgatgctgactttttgtcattacccagagatattagatatttagattctttactaattctctgtttttgagtaaagatagttgccccttttctatctacattcatacctgatattataatccctttagattctaacaaacttaccatatttactattggagtactatttaaatcccaaaactctctagtcttatatgcaagagattctatatcacttatattaatatctgacattacttttctatttggcaagttttcttttggaaacttaatataattctccataaatgaatatattttatgtattataattattttttctctataagaaatctcttctactctaggtagtttagattgagggttaaaatggctatcctctacaacgatatttatattttcatttttataaaaatactcttttggaaaatttaatatattagataattttaatgtattttctatatttggtacatacttattttcctcaaaagcttttaaatcttttttatttattttagtttctttagacaactgttctatcgtctttgctctaaaaattctagctgattttaatctctttccattaaagtcttttaaattcatttgttttctctctttcaaaattaaattcttaatctattggtataaataagattacaattaataatttatcatattattgacaaaaaaacaaaaggtgaaaatatttttttatattttcaccttttagataagtttataataaatattcctaattactcaaaaagttttaaatattctccatatcctaaaacttccatattttctcttggtataaatttaagagaagcagaatttatacaatatcttaaacctccaagttcttttggaccatcatcaaatacatgacctaaatgagaatttcctttagcacttcttacttcaattctgtacataccttgtgagaaatcacttctctcaatgatagatttatctataactggctttgaaaaacttggccacccacatccagaatcaaatttatcttttgaagaaaataacacttctccacttacaatatcaacataaattccctctttgttattatcataatattcattttcaaaaggtacttctgtcatatcattttgagtgacttcaaattgtataggagttaaagtcttttttaactcttccctatttatattgtttccatcccaatgactttttacaaaattatatcttccagaccctttataatacatattgtagtttaatggtctttttttataataatcctgatgattttcttctgcttcgtagaatttagttgctggaattatatcagtcactattttactatcaaatattttactattttccagatgttctcttgactctaaagctatatttttttgttcttcatcatgataaaatatagcagtcttatattgagttcccctatcaccaaattgtccaccatcatctgtaggattaatctgtttccagaagatatttagaagttcatcataacttattatatcatcatcatatgttatttgaattgcttctaaatgaccagtagttcctgaacatacctcttgatatgtagggttttcaacatgaccacctgtatatccagaaactactttaataactccatcatacttatcgaaaggttttaccatacaccaaaaacatccacctgcaaaagtagcaagttttatcattttcatcactccttaaataaattatactttatttattccctaagaagtaacttaataatctgcattttattatttttacctactcaatgaaatcatgtgcaaaaatacaattgcaaattgaatctaatttctataaaagctctttttctttatccatccaaaagcatcttttatatcacaattttctcctaaagacattagatattctaatgcatcacaatcatccatagctacatctttttccatcttaggatttaatctatagtaattatctccaagaagtttttgagaaaataactgactcatttgagaatttccttctaaggtaatagatataattggtaaatcgggttctttattaattatccagtcaatagctccccattcagtagtatctgcctttatactattatatacatatccagtccctattgaaaaaagtcttgtattcttaagtttaaatccactgtcaatggcatgaattatacacgctaaacttgggtcagttgctattattcctccatcaacatgacgattatatgttggaaaaaatactggagcagcactacttgccattgctacatctacaactttgctagtctttgtaaaagaatttggcatattgttataaaacactggtttccatgcattttcctcatttcctatataaaaacttggtatcattactaatttatttaaatcttttaattctagttcctctggaaatatacttaataaaacttcttttaagtttttgttttcatactttggtctgagtatttctgcataacttttattaaaaatatacttagaattttcaattgagtaaagttcttttatctctttagggcttacaccatacgcaagtcctagtgcaattagactccctgtagatgtccctccaaacatatttatattgtttaatagatttggatactcttttactatcctctcaagtatggatatactcaatgccccttttaatccaccaccatcaaatgccaatatattaaaattagaacttttcatatacatatacccccacataaaacaccttatattttaatcaaaataatttcactatagtatatatattttatgcaagttacatattacaatgttcctcttttaatatttaagttacattcaaacctttagtacttaaaataaaatatataagatattatatatctaagtattataaatttaatacaaaaattcttaaaagaatatactgaaagcaggtttatttttcaattattacaaaaaataaataaagggtcgtctcaaaattgattttttaatcaaattttaagtttaaccccttatcttaattgtgacatacttaaaaatattttaactataaatatctttaagtatagatatatttatttatcctaaaatcttcttcatatcttcttcaggagtagatataggtgtcaatgcaaatttatcaaccaatatatctaatacattcttagataagaatgctggcaaagaaggccctatatagatatttttgatacctaaatgaagtagtgtaagaagtatacaaacagctttctgctcataccatgacagtaccatgctaagaggcaaatcatttactccacattcaaaagcatttgccaatgaaactgccactttaattgcactataagcatcattacattgtcccatatccattaaacgaggtaagccacctatatccccaaggtctaaatcattaaatctatattttccacatgcaagtgtcaatataacagtatctttaggagcttgttttacaaattcagtgtaataatttcttccaagttttgcaccatcacaacctccaaccaataaaaagtgtcttatagctccactctttacagcatctactactttatcttgtacagatgaaactgtacctcttgcaaaaccagtagttaatgtatctcctccattaataccagtcatatgaacatcttctctatatcctccaagttcaagagctttttctattacactagaaaaatctttatcttcatcaatatgaaccatacctggataagcaactacttctgtagtaaatactctatctctataactatctttaacaggcattaaacagtttgttgtaaataatattggagcaggaatattatcaaattctttttgttggttttgccatgctgtaccaaaattaccttttagatgtttatattcttttagttttggatatgcatgtgctggtaataactcaccatgagtatatatatttatacccttatctttcgtttgttctaataatttgtgtaaatcataaaggtcatgtcctgtaactacaataaatggccctttctcgattttcatagatacctgagtcggttctggtgttccataagtttcagtatttgctctatcaagcaattccatacattttaagtttatttctccagttttcataactagacctaaaagttcgtcaatagacaagtctcctccaactgctattaatccttcatagaaaaattcatttacgtctttgtctgtataaccaagtaccattgcatgatatgcataggcagccatgcctcttaatccaaataagattaatgattttaatgaacgtatatcctcattatcattccataaatccttcatatcatagttatcatttctattacaagttgttgaacaatctgaacatctaggtacaagtttacttttttctacctcagttttttcaatttgtctttttatagcttcatcatcaaaacttacattcgttatagtagtgaatagcccctctatcataattttatctgtttcacttgttggtctattcttatttccaatagttgctcttgaaagaccaatcaacactcctgtaagctcgtcttgcaagttagctgtacccccctttttaccacaaacaccatttatagtacaacctttacctcctgctgtttgttcacattgaaaacaaaacattttttccattttttattcctccctttttatttattaaaatttattatatttttctatgattcacttaattaaatttctccatctacaatttttccatctacagatatagtaactatttgccatggtatcatttttccactattttgtagagctgtcttaacagcatttactataccaccacagcaaggaacttccatacgtgttactactatatttttaatatcattttcttttaaaatctctgtcagtttttcagcatagtcaacttcatcaagtttagggcatccgattaatgtaaccttatttttcataaatttattatgaaaatttccatatgcatacgctgtacagtctgctgctattaaaagacttgcattctttaaatatgatgcattagttggtactaattttatttgtactggccattgattaagttgagaaccttttatctctactatatcattgcttatagatgtactatttgaaacctctctatttattgacttagactgagaacctggacatccacatgctaaagttttcttttgtgctttctttgcttccatatttgcttttactgcagcttcatcatattctgctgcttctctatactcaaatgaaatcgcatttgttggacaagttggcagacaatctcccagcccatcacaatagtcatctcttaaaagttttgcttttccatttaccattcctatagcttcttcatgacaagcttcaacacatagtccacaaccattacactttccctcatcaattttaattatttttctcatcatttatatcacctcataaaatttttttaatttaaagtattgatttcttatatatttatttttaatacctatatttctttatttcaaatttcttgtagtaggatttttatatccccttgcttttataaacttagtatagtacaatgaaaacaaattatcggttgcatatgcaacaaggaagtgattatttgaaaaaatttttagaaaagcatatagacctacttaaaaaaattcctctatttgaaggaattaaaagtgatgagcttgaagaaatgttggaatgtttaggtgttgtagataagacttacccaaaagatagtataatattctctgttggaagtgaagttacttctattggaattatgcttaaaggaagtgctcatataataaaggaagatatcgaagggaataggaatattgtagctgaactcttgcctggagatttatttggagaggtattcgcatgtactagactacataaaagtaatgttacagtaaccacaacatcttcttgcgaagttttatttataaagtttaaaagtgtaactggtatttgttcatctgcatgtgtatttcataataggcttgttgaaaatatgctacaattaatagctgaaaaaaacattttacttcacaataaaatagaattactttctcgtaaaacaactcgcgagaaattgcttatgtatttttcaaaacagatagaacaaacaggtagccaccagtttacaattcccttttcaagaaatgaaatggctgattttttatgtgttgacagaagttctatgtcaagagagcttggcaagatgcgagatgaaggcttgttatcttttaataaaaataaatttgaaatcttttactttcaaaaataaactagatatttaaacatatttatttcaatatatactatattagttaattcaaattataaatatcatatttgaatcttaaatttatatttttacttaaaaagttaatagatatctaatttattaaaattaagatacctattaactttattaattaagtgtacaattagcttattttctttgtagtaattgctgttttatctataagccaatcttttccttctactaatcttgaaactaacattgatgatactgtatttccagttgtatttaatatagtattaggaatatcagttatagtagttataactgttaacaatggaattgcctccactggaaaaccgaagatgctaaccacgagcatctcaccaataagtcagccacctgctacaggagccataaatactccaacaacaaatacagttataaataattgacctatcgttgctggatttgccattccactgcctaaaatacctgataaaaatgccacttttattattactgctaaaactgacccatctttatgtatatttattccaagaggtataactgtttctgatatatcatcaggaactcctatatttttactagcttctaaatttgatggtatacatgctgaacttgaagaagtagctagtgccgttgctattggttttatagcatttctccagaattgtctaaacccttgttttcctgcagataaaaaagcatacagactgtaaaataataagaaatacatggctgctgttagtgaataaattacaaacacccttacatatccttgaattattttgcttccaagttccccaattattgtagctgtataacagcctagccctataggagcataaagcatgactatacttactacttttaatattgcttccgttccttctgataaaaactttcttattgtatttcccctatctcccatcatagctattgctgttccaactaaaactgcaaatataactaattgtagtaaattgctactggaaaataaatctccaaaatttttaactgtaatacttgatactacttggtctaataacgttccttttgattctaaagtttctgcatcttgagccaccattaaactttttacacttgatacatctaatcctttagacggattaaataataatgcagatgtaatacctaaaaatgcaattacaagtgttgttcccataaatactatagctgtactcttcattatttttccaaaacgttccatattttttatactagcaacacctgaagaaacactaagaaaaactaatggtactactatcattaatagagcatttatgaataaatctccaaatggttttagtattgaagcttttggaccaagtactaatcctactatcacccctattatagtacatgctaaaagtataattgatgacttataattttttaaaaagtccctcatttatattttcctttctaatgttttatattataaattaccctaaatcctaaaaaaattaaagtaaattatctaatgcgcattaataatttttgtaattttccccaacagctactttagcaaatactggaatatatgtcaatttctatagtttttttgtatctttaatattttattaatagttcatatctatatataaatattaataaaattctgcttttaaaactttttttctagattaattttaataaaacaaacaatataaaaaaatatatataatattgcttaattattttcaaatttaataatttgtactttaatataaagttttagtatactcattgtaattcctatgctttatcattccatcaagttaattttgtaaacatatatgatattttgtcaaatattattttttcatgtacttgatatttttgatatacttttaaaaagaattttcaaatagttacatttctaattttaaattaaataataaatctaataataaaaagatacttccattaaatttattatctaacttataaatttaatgggagtatcttacatatcttctaatacttaatttatacacttttaactaaatacttcttctttcctaacgatatttaaaaattttgcagttctttcatttttaggattattaaatatttcatcaggagttccttcttcagctattacaccattatccataaatataattttatcagcaacttcttttgcaaaatttatttcgtgagttacaataagcattgttattccttctttcgcaagcgattttataacgcttaaaacttctccaacaagttctgggtcaagtgcagatgttggctcatcaaataatattacatttggatttactgccatcgctcttgctatacctatcctttgttgctgccccccagacaattttgatggataaaaatctttcctatccaacatacctactttatctattaattttaaagatatttctctagcttctttattactctttttatgtactactatcaatgcctccattacattttctaatgctgttttatttttaaataagttataattttgaaataccatagatgtatgttttcttaaattggctatatctttttttgttgctttttctacatctacttttacatcaccaatcattatctttccttttgtaggctcaactaaataatttaaacatctaagtaacgtagatttacctgttccagatggtccaagtatagctactacttcactttgatttatctctaaatttatacctttaagaacttctgtccctttaaaacttttatgtaaattttctacttttatcattgttatccacctttttaaataaatataataaataatatgttctacatcaaaattaatatactagcattaaatttaaaaataggctaaatatatttttatgaatgtactctatagttgacataaataatctactgcaagttgtgagaataatgaagatgctatactaagacatttttcatctatattaaacttgttactatgcaatctgtagtttatatttttttctttatttcctacacctatatacataaataaaccaggtttttctttcatataaatagcaaaatcctcacctgtcattgcaggaaaatcaattatttcaacattttcaactccaagtattttgcaagcactttctcttcctagctctatcatgtttttgtcatttataacagcatctcctcctgtactcttttcaaatttgcaatctgctccgtatgctctacatacatttcttactatattttctagaattttacttacttcaattacttgttccttgcttatcgctctaatagtcccttgaagtgtgcatacatctggtattatatttttagaaacaccagaattaaaagaacaaacagacactactacaggtacaactgggtcaatttttcttgaaactatctgttgaatggatgaatatactgcatttccaactgcaattgggtctatacaattatgaggctctgctccatgcccgcccttgccaattattgttatttcaaaagtattagtcgctgccatagcacaatttctagcgattccaatttttcctgattcaatagttggccaacaatgaccagttgctaatgcatccacaccttcaagtacattttctttaattacaatatcagaaccacctttttcttcgccaggttgaaatagtaattttacatttccattcaattcttcttttatgtcatttaaaatcattgctgttcctaacaaccatgaaacatgggcatcatgcccacaagcatgcatattatcatttattgatttaaattctaaatcattttcctctttgattggaagggcatccatatccgctctaagcaatatagttttcccaccattattttttccttttatagtagctaatactcctgtaccagcaacatctatgtattctattttaagtttatttaactcttcttttataagtttggatgttttaaattctttaaatgctaactctggattactgtgtatctgtcgtcttatttttatgattttttctctattttttagtgcaatggattttattttagtttcaatcatttgcaagacctccataactcattttaatttataaagactaatctaaatacattgtaatacacagataactatagataaatttagtatacttatctatagttatcacagttttatattttaattttaaagtatttatttttgtatatcagcacttacatccattccaaaccatttttcagatatttttttcactgttccatctgaaagcatttcttctattgctttatttacatcttcttttatagttttagatttttcatcatttttcttaaagaagtatgctatattagtaactgataatttttcatctaatactcttaccttcatattagcttttttagcgtctcctacaacagtaagttctgcatcaatccatgcgctaactcttcctaaatctaaatcttgaagaccattagttccatcaccataaaccttttcttcaaacaaattatctttattaacactagctgcaacctgttgcccttgagaaccttctgaaactgctacaacttttccttttaaatcttcaagtttattaatttcgttgtttccatcttttacagctatacatacagaatcagaaccataaggtatagaagcatcgtatttttctaatctttctttagacattccaaagaaattggctgccacatcaactttaccagaatctaacatcccaaatatagaactaaaacctgttggttccatttttatcttatatccacttcttttaccaatctctttccacatatcaacttcaaaacccttatgctcaccattatcaacataagaatatgggtcagctgaattagatgaagctacagttataactttttcatcctttacttcctctttttttgaacaaccagcaactacaaatgttaacgataaaactgccactaaacattttataatatttctttttaccatatctcttctcctcacaccattttttatataaaaatacttttatgtattttcttaataacttaataattgcttattttcttttctaattttttttgcccccaccctaaaggagttattatgcaccagtaaattaccataactgctccatacacttcaaagaacttaaaactcaacgctccttgtgatttggcagcacccattatatcatttactccaacaacaaaagctacagaagaccctttaattaaatctataaaattattgaataatgatggcagtgcaactcttacggcctgtggtatcactatccttttcattgtttgtaaatttgttaatcccattacatatgctgcttctatctgacctttatcaattgaaagtatagatgcccttatcgtttcggacatataagctcccatatttaaactaagtactatagatgttgcaaatactgggtccatatttttaacaaaatcgttcatatacgctagtccaaaatataaaaagaataactgtggcataagaggcgtacctctaaagatagatacatatactttacatatttgattcaatactttcactttgtaataagatgataatgctactattgtacctataattaatgaaaatactaatgaacttattgccaaaattacagttacattgaacgatttcattattattggaaataattctaaaaaatatttcatattaaaaatcataaaataagtccccctagcttaatgttgttttttataaaactttgtcgaatattaaattacaatagaattttatttattttttcaatagaaaaactattttttaacttgattatacagtccattttgatactatattttctcaataatttagattactaagtttatttttctaaaattaaaaatttatttacaagtaataatatatctacatcatcccatttttaaatattgaaatctaatatgcctttcctattcttttttcaactttgctttgtatattactcaatattatagatactgcccagtaaattaatatcgttatcatatatatctcaaaatatttaaaacttgaagcagcctctacttgagctactcccattaaatcttgtattcctatagttagacctaaagaagaacctttaattatgtccagtgtacagcttacaataggaggtactgcagatgtagctgcttgaggtagaattattttaaccattgactgatatttacttaacccaaaagcataacatgcttcctgttgtcctttatcaacactctcaatagatgctcgtataatttcagtcatatatgcagatgaatttacacctaaacaaattactattgctaaataaggtgaacaatctttcataaaagaaaatatcattggaaatccaaagtaaaagaaaaatatttgaattaaaagtggtgttcctctaaagaatgaaacatacactcttgttatgtattgcaaaacttttgattttgtctgtgtgaaaaaggcaagtattacacctaataatattgataaaaaaaatgcaacaatagatattagtattgttattcccaatgctttaatcaaaaatggaaatatacttagacaaaattcaaaattaaaattactcattaataggctccttagtaatgtcttttcctagccaggcttcagatattttagtcaaagtcccatctttatgcatctcttcaattacttcgttaatttcttttgtccatttttcacctttttcatttttttgaatcgcaaaagaacaggctccgaattgaattggaggttctaccattttaagatttaatttttgttcttttatagctattaaagcctcaacatcctgcgcaactactgcatctaatcttcccatttctagatcttgataattccctttaagagttgcacttgaataatttactatttttatttcatcatttgggtacttttcttttagtatttcatttgctactgctccagtacccacacctactttcttgccaactaaatcatctattgattttatactagtatcatcttctctaacaataatgtttgttccactataattataagcatctgaaaaagcatattttttctctctttcaggtgttgcagtaagttgagcagatacaacatctgctttatcagcttctaataatccaaataatccactaaaatcagttaatacccattcaactttacaattagttcgtttagcaaattcatcccaaaaatctacttcaaatcctttaagtttatctttatctttaaaagcaaaagggtaatatgttcctgatgttgcaactcttatagttttttgttcttctttatttttattatttcctgatgaacatcctgtaattaaaagtgctaataccaaggcaagcataataattaatttaagttttttcataatttattctctcctttttaatcttattttaattttttatataatacattttcaaaggttgaatcacttgtaccattataattgtttaatggctctgccataacataactcccaaatattgatactgtagtaaaagattgcctcttattttataccttactaaatttgcttttataacactataaatcaattttctagttattatattatacttcgactttgaacaacataagtttaatatgttttacagtctttgtccaatagcaaaaaactattactaaaaatcacattatagtatccaactatatccataaaaaagctatattgagtttttattataacaaactcaatatagctttttgtaaaaatatcttataccaagtataagtcactctctatatttaatttatttattaaattttaatgctcctgtaggacataccattacacaaggtgaatccataccacacttatatctctcaatacaaccattacacttatttgccttaccatcatttccataaattaaggctccatattcacaagctttttcacaaagtttacaccctatacagttttgattgtctaatacaacgaatccttcttcttttttaaaacaatttttaggacatgcacctaaacattttggctcattacaatggatacatgctaatgaaaaatattctatattttcaccttcctctattgtaaatacatgtctaaaaagttcaccattgtctatattattatcattttggtctatacatgcaagcaaacatgctccacatgctgtacataattctttattaaatttaaataaacttttcattatatctctccatttatctattcattttttcaatcttacacttgcaacttctatacgcagggaatccactataagggtcaaaattatcatcaataatactatttatatcagattctctatatccatgatacatatgtatattcttatataagactctatcagtaacattgacttttacatccaaacttcctatcttagtagttatttttatataatctccactgataacacccaattcttttgcatccaagctggaaatatcacaactagcttcattttttaatattcttgaaagtttgatgtcatgaagtcttgaatgtagtgcatttgaaattcttgctcctgatgtcaataaatgagtatattcattatctatattatcattaaatcctctatatgttggtagtgcatccagtccaaaatctttatatttttcaataattgtagattttaattcaaacctagaagtgctagtatcatacccctctcttgtatatgagcctactatatatggcttaaaatctttacattttaatggtaaatcactttctttaagtttatctacatctacacacgtctttttaaacatatgtcttatacttgcttcataacctgcttttaataaatcatcatctatattcataacatttgctaaatctgaaagtatttctacatctgattttgaatcgtataatttatcaataacttttttggtatatgtaatataccctcctgggtaactcttacattcttctctctcaaatgatgtacacgcaggtaaaagtatatctgcatattttgatgtatctgtcataaataaatctatattcacaaaaaaatctacactatgcaacgctttaaaaagtctccctgaattaggaaacattctagcatttatcccatgacaaaacaaagctcttatttcatatggtgtcttttcttctatttgcctaggtaaatccatagcttgaaattgagttaccatttcattccatagaggaaatctttctccaccaattctttcatttatatttttaggtagaacttcttttacaaactctttttctagtgtttggaatccacctatcttaccagcaaagtaatcttgttttggtatgtttccacctattctatcataattacctgttatagcagataaagacatcattgctctatagttttgaaatccattttgatgatgaactattggagctgcactttcatttatacaaaatggaccttgtgacaacatctcaacagcttttactatattatctttagaaactcctgtaattctacttacagtatctaaatcaaataattttacatattctttatattcattaaatccatgtacatgcttttctatgtattctctatctattaaatccttttgtataaatagattcgccattccaagagctaaagctccatcagttccaggtttaattcttaaatgtaaatctgctagtttttgagttgtcggtgttattctagggtctacaattataaattttagacctttttcttttaattttattagattcacactatttaaaaatttagagtagtatggattaaatccccaccctaaataagtttttgcattctccatatcttgcattgtaaagtttcttccagtagcaacatttccagccatctgtgctgatgttgaacatgaactagattctgtaccataattaggtgaaccaaatgaagatgcaaacctttgcaaaaaaggtctataccactttccataacccgtaaaaaaagctacatgctttgctccatactcagattttactctatttaatttttctgctatttctctataagcttcatcccatgatattggtttaaattttccttcacctctttttccaattctttttagaggtgtttttattctatcttctctatatatatattctctattgcaaagacctttggtacataacaaccctttattcattggatgttcttttgtaccttctatttttattactttaccatctttaacatatgcatcaattccacaatgtactcctggagaacaaatatcacataaagtcctctttatttctatacctgtttccttacagggtattttagctttaagttgtctataactatccatattaacattttcctttcccaataataaatacaaattattatacttattatacattctttttattcaaatatcatactttatattttatatagtgcaatttctaagaatatttttaataataagattttatatttattaataatctatttatataattatttttcattcatagtttataagataattcaataaaaatctaatagtaaattgttatttacacatatattgtaatagataaaagctattcatatctgccttaattttagtcttaaatttagagtgtaaattgaatgcatttagattataatatatacagtgaggtaaggtgaataatatgaaaatagatatgatatataaactaataagaagaaatacagaaccatcaagatggtcaagaggtgtaaaatattatactaatcaattagttgattatatagacatagatattgatgacctacaaaataacctgttgacatttcgtggtggagtcaattctgaagataattatagcttttattttaattcaataactatagatataaagcactttaagataattgaaaatgattgtagttgcgctgactgtcaatcaaagggcaaaagtatttttatatgtaagcatatagttgctattgtgataaaaagcttaaaacaaataaaaaataaaagagatgttcctcctattctaatagatatattaggtgcagataaggataagctttctaatacaaattctaaaacaagcttagatttaagcaagcaattactttctttgttagacaatactaaaagagaaagggttaatttagatgtattgataaatgtggattcaaataaagcaattgctgaatttaaaataggaattgataaaatgtacattttaaaaaacattactgaatttgcatattcaaaacttaatggatatgaattagattttgggaagaaatttacttacaaccccaacattcattattttgctgatgaagatgagaagttagtagatattatagaagaatatgggacaaatctttcatacaacttttcttcatcacattcaaaaaaatttatggagataaatgcaagctctttaaaacaatttttaaatgctattaagtacaaggattttacccttattttttctaaagaggaatatcatccaaagatattaaatgatactctacctgtaaggtttgattttaaaaatatagaagataaaatagtcttatattctaaagattcactacctgttccacttactaaaaaaaatgatgtacttttatatgatggcaatatctatttattatcacataaaaaagctcatgattattcaaaaatatatcaaatattatcaaagactaaagagttaaaatttgataaagaggattctaaggatgttttaggattgctagttcctagattaaaatctatatctcaagaagttcatttagatgataacataaaaaataatataacaaaagattttaaatctgagttctactttgatatgattgatggcaacatatgttgtgatgtaaagtatatatatgatgatgaggataaaaaatttgtgctccccaacatacaaaaggaaactactattgaaaataaacttacttcttcacaatttacaaaggaaaataatcattatgtgtttaaaggaactgactatgacctatttacatttttagatttacaattagaatctctaaaggaatttggagatatatattattctgagaagtttaaattgaaaaaaatatataacgcttcatcaattcaagcttcaatcaatcagactaaccagaattacctagaatttaattttaatatatctgatataaatccaaaagagtacaaggatattttgaaagcttttcaagaaaaacgtactttttataaacttaaagatggaaactttatagatttatcagaaagagaaacaaaagatttttttgaattagttgaaaatctagatataatggataaatcaaaaaataataaaatttataaaaataaagctctatatataaatgatgtaatacgtagtaaaaatttaaagtttatagatggtaaaaaagaactagacagtatatgtgaaaaatttagaaattttgatagcataaatttagaaattcccgcaaatttaaatgcaaaccttcgtgattatcaaataaatggcctcaattggtttaaagttttagattattataaatttggtggtatattagctgatgaaatgggtcttggtaaaacaatacagactattgcatttttattatcattatctaataaaaaaagtcttattgttacaccgacatcactcatttataattggaaaaatgaatttgaaaagtttgctccagatataaaagttttattgatacatgggaataaaagagatagagaaaaatgttttatggaattagaaaattttgatgtaatacttacaacatatggtactcttagaaatgatttagaaaaatatagtgaaataaagtttgattattgtatattagatgaagctcaaaatataaaaaatccagtagctttagtaactgagtctgtaaaaagtataaatgcagaaaataaatttgcactcactggtacacctatggaaaataatctactagaattatggtctatatttgattttataatgcctggctatctatatagtaaagcaaagtttcaggaattgtttataaataaagaggataatgttaaaaacctgaaaaaattaataaaaccttttattcttagaagaagtaaaaaacaagttatgaaagaacttccagataagattgaaaaaaacttttttgttgaattgaataaagagcagaaaaagatatatagtgtatattcaaaagatatacaagataaaatgaaagataaaaatctaaagaaagataaaatagttatattttcttatttaactaaactaagacaactttgtttagacccaagtatagtagtaaaagattacaataaaaaaagttcaaaaattgaaacatgtttagaaatacttagggatagtataaacgaaaaccacaaaatattattgttttcacaatttacttctgtgcttaagaacataagtaaggaacttgataagtataaaattaaataccattatatagatggtaaaactaatgccaaagaaagacttgaacttgtagatgagttcaataatagtatggataaaaaagtttttttaatatctttaaaagcaggcggaactggtttaaatcttacatctgctgacatggtaattcactttgacccatggtggaatccatcagtagaaaatcaagctagtgatagagctcatagatttggtcaaaaaaattcagtacaagttataaaattgattgctaaagggactatagaagaaaaaataataaaattacaagaaagtaaaaaagagcttataaatcaatttataaatggagaactttctaatgaaggtgtattaaaaagtctatctgatgaagagataatagacttatttaactaaattatttaatcctacagcttaactatataaatttattctaacatttatatagttaagctacaatatctgaataaataaaatttcatattgttatttaatcccaactttacaatctaatgatatctctttctatacatattgcatatacaaatgtaataacttgactattagaatattttgttttaacaatcctatttcatcataataatgaagtatatgtacactcacttttgtaagttttgcaatccattttacagttttcattattgtaaattttggttaaattattcctctaaaaatttctttgctacatttgaaaaatctaatccattcgataaaattgcaggatgaccacctttatcaaacaaatacattttaccatttttaatcttttcaagaagtaatgaaaaagtattttcaaaaaaatcactagatattagagatacaaactcatcttctctacttcctgttaaaagcacctctggttgcatagtttctagaggcttatgaaaaaattttcctatagttttataatgttcaaaaatagcttctgtatcattatctacaactttttcccagttttctccttgattataaatataaaaagcttttgcaccatcatcttgctttgatgcctcacgctctattttaacattttgtacaaatgactctaaaggaacttctccttcaaaactatctgcaattaccttattcactaaatcaggtctctcaagtgcaacatttaatgcaacaagagctcctccactactaccaattatgtttacttttttatagttcattgcttctaaaaaacatatcacttgcatagcctcatcaaaccataagtcagcagaaaatttatcgaccatttgagattttccatgacctacaaaatcaattaatattactttatattcatctttataaaaatcgattatatcattaaacattttggaagaggctgtatttccatgtaaaaaaagtaatggtgtaccatccccaatttcattatagtagcactgtttgtcgttatagttaaaatatgccatatattacctcctttaatatccctataggtatatatttattacttatatttaaaatgactattgtcataaacatttaaaaatagtatagcttagaatgtagataaagtcaacattcctttccttaacaacttctattgttttttgaaacttcatttcgataacagaataattcataaatattgatactcttacttaaatatatgatttcatcatcagagagagcagtaataactaaattatcgtatatctcttttcactttaaccatttttttctttataggtatctccttatatttttttaatatcaaatctcccttataatttaatatatctacatatgaacataaatcttgaacttcaattacacctatatcatcattagttataccttttatattactaaatgcaccaactatatctaaaactcttattttcttcttcttaccagcatttaaatataatttaacaacttcactttctatatttagttttatatctttacttttgtaagaatttttatcaactttttttctctttgatactttttttaggattccttttgaatattcttcaaacaaaattttgccatgtgtaattctacttttttctatatcttttaattcatttactttatatcctatatacgtttctatattctctatatatttttcatccttttcagttactatagtaattgcctttccactatttccttttctcccagttctacctattctatgtatatagttttctttatcttgtggcacatcataatttattactaaagaaatatcatcaatatgtattcctctggacgctacatcactactaactaatatattaaatttttggtttttaaaatccttaattacaaaaattcttctttcttgtgataaatctgcatgtaactctcttattaaaaaaccctctttactcatcttattatataatttagatactttctctttggtattacaaaatattatcacactctttggattttcgctgtatattaattcttttaaaaggatgtacttctctcttccatttgccttgattattttgtcatctatttgtcttgttttttgattagtatcgctctcattttcttctatatttataacactgtaatctagcatatatttttcacatatatattttatctcttcatctattgtagctgaaaaaagacttactattttctccttaggtaaatttaataatattttttccatttgttcaacaaaacctttattaaacattttatctgcctcatctattactaaatactttacattttccaacttaatagaacctttatttatatggtcaagtattctgcctggagtagctacaacaatatgaaccctttgtttcaattcagctatttggtcttttatagattgtttgccaaatatagcactacatctcaccttctttagtctccctatatctgatatctcatcttttacttgcaaggctaattctcttgttggaaccactataagagcttgaatattattgcaatctacatttatattctcgcataaaggtattgcaaaacttactgtctttccacttcctgtttttgacctaactactaagttttgaccttttaataattttggaataacttctctttgtactctagaaggtatattatatcctaaactcttcaatgacttaagtatcttttcatttaacttaaatttttcaaatgtatatttcatatattaccaccttattatatttatcttatctatatatttttctacattatattattataatacaaggttctactatttttatattatttattagactgaagataaaaatatatactctataaacctatagtttagtagcaaatcaattaaatttttatatttaaatacctccttaaatatactgataaatcaatatttaggaggtatctcttgtcaataatcaaactaatctatattttgaaagtttaaattatactaatacattgtatttttatttatatctaatattaaaaggtattaatcaatacctaaatcaccataatctcacatatttatatctttattcaatataccttctgtaatcaatcgtgctatataatcataacctgattcatttgctttgttacaatcattcacattatcacagaaaaaactttcaatctgtattgcaactggatttgtatttctcaatatatataaattttctctttttttagctcctctattttcaaataattctccaagtctattagatactcttttagcatattctaatccttcagtgccatagtaaagcacttctgtaccacattgtgttccatcagctttatttaaatgtagctctactaataaatcgtatttaccactgtttacttttggaactctatagaaaaattcttctctttctgacataaagtgcctttctggacaaattattacatctactgtattaccttgacttataagcatctcagctaacataggagctaattttttattataattgtattcatcaactataccatttacacctgtacttttaccaccttttagtatactatgacctactgttatgcatattttcatttacttttttcaccttcttttaagccaatttttatataatagtaatataattttaaagttattactaataataatatattaattgaagaaggtaaaagttctccgtgattatcatttttttaacatatttgtcttattttatcataagtctatattttttaaatattatactatacttattatttataattgtttaattaatcatttatatatattataaatatatcaatatctattttcctttaaccaaatgctattttaataagtttaagttttagctttaaaatacttaataatacaataaaagtgatgtatttacaaataattcttctggatttaattcatttattgatgtatgttcaatttttatatttatatttttcatatcttcataaataattccaactggagaacaaatgaaacaagaaaatccaaaagtttttgttattttttttaccttattatcaccaaaacttatttgctttttacaatcgtttatattttcattgttattttgtatatcatttttataatacttatcttttttaatatcattaaacttatttactgttttaaaattactcctatttttacaactatagtctatttcaacttctatacacccaaaaactatcgagttacataatttcaaattactacctttgtttataagatttttcataggtttaacatcaaatattttactatttacatttacttttaatatatctcttagatttttaggagcttttaaagtattacttatattcaattgtttgaatacaattttatttacattagtataaactctattactttctattgatattcttgttgggaatttatctagattacacttataataatagtatatattagcactattctttataatcctatgtgcagaatttggtaaaactacactcttaaaagatattatttttttacaacttgcatctattctccctatgtaaaaaccttgctgtgggtctaatccacgttttataatgccattaacttttacagtattatttataaactctatatatttagaaatataatctttgaaaaatatatttccagttttgtacctacttgtatttgtaacaataatagtgtaggtcaaaatctcaaatacagatgcacattttttatcaacatatttttctacttttataatacttccatttgcatcatttgaaaatacatcattaaaagtagttttcgttattctcattgcatccacctttctataatttaaagattactctatcttggaactattttcataacttataattgcagtaacactaataaataaattatcatctaaaatagatgaagtaatatcttgtataagatactttaaattaattttatctttattttctatctttctaggcatttgtataaatgtactaaagggtatttttaatttaaatgtattttttttactagaatttctatttcttttattgcctgcataatctaatgttacatcagtatctatatcgccaactaaaatcaacttctttcctgtcatttgttcatcttctgacgatatacattccatagtatcaacgagacttatgctatgaatattcatattataagtagatgtatctaatgagtttattacagtttttttagaagttaacttaaagtttttatatgtattaaattgagataaataaagagcattttctagcttttcacatctttcaaaattatatattaccttattattttcatacataatcacatcaatctccctatatctatatattaatactattcataaaaactatttcaaattaccatttttgattattcacgattcagttactacttacttttaggaaagaatataaataatagtgactatactaattatccagattaatatagtcactactttaatacaaactaaatgaatattatattattttttacttgaaatttaaacaatctttattttcattaaatctattattccggtttatatatgactttactatcagcatcatatattaccaaagaatttgcttttatgacttcatcattgtacttaatgtctttttgagaaaaattaactaatacctttaaatcttctccatattcagtcatttgaactagtctatcctcagaaataaatttaaagtctgtcatttcttttttaatagctttcttattaaacgctgaccatactttattgtttgagattatttcatctttatgtttttcccattcagttctatctatataatacataggtggtgtattatataatacttctttcatcattctacttccaacttcatccttaatcttcaaagttccccataaccactgatgggaagatatcacagaatcattataaactaatctaaataaaggtagagagtaaattgggtctataaatatttttttgtacctttcttttacaggtatctgctttgaaaatatttctggtactcctcctgttggagaatagtatttaccaacataatattcactgcctttattcttactcatatctttatctacccaagcaaatgctggtgtctcaataccatgtgcaaatgctatagtactacttgaaaaatcatttccaccttctgaacctatgaccatatttgcatggtctcttatatatgacattctttcaagtctagcatttaaatcttgtgtttgtgttgttatatgattttgagaataatcatcatagatttctcctgtagcatcacaatctataaaccaagaattaaattcatatccttcatccaatatactttgtactctctcttttacacttggtaaagacaatgtaggatttagttttcttccttctccttgaaatccagtttctttttcaccttttttattttctatggtagcattttcatatagagatttatctttaaatgatgctgtactccacttttcttcccctggtttgtgtatagagtggtatgaatcatatggccctacgagataacctaactcattagctcttttaaccatctctaaggatatataaccttcctccatatcatcaaatcctatccacgcatttttaataccagacttattaatatcattaattacatcagttgtattatattttgcccatgtagcaacatcattcacgctctcttccaattttgatttcaataatttcttattaaactctataagttctaccctacttaatttagatatacctttatctaatactttttttatttctctatctttgctttcaaaaactttttcattataaaaagtattcatctgcataacttcattaaatgcttgtactatttgatttttttgatatttatctatataatcttgagtttttatttgattaattacttttataaattcactattgccagacttcatacttaaaagctctttcatccaattagtcaaatcatctgataaattttcttttaatttattccattcaatatcatttattgtgatgatagacttatctccaaaataaatatgtggtgctccataaagtttttcaatatttttattttccttagatttttcttttaatgttttaaattctcctttatcaactatataatttttataagtttttgctacatctgtaatattcttattagtcaaatatattttaaacccatactccttatttttattgatacttggatattcatgtttaaatgtaaaattaatcttgtctttagaactaaattcaattacattgttaaattcattttcgataatataaatcacagaatactttgccttgtttactgcaaagaattgcattgaaaaagattctataacattataagttgactcatttagatactccttccaatacttatcattacttggtataaacttaccctcataaagtggtagtatataactttccccttcaactttgggccaattaaaactagtttctttttctaaattagatttaatatttacatctaaatagctgtcctctttttttatatttatgtctatattttcatcaggatacgtccacgatgcctctgtcttattctttttaaaatttgatactttcctttcttttgagggttcagatatcttttcttttgaaccaccagattcaactgatacctcaaatatttcaggtttcacctcaaaactaaaatccaaatttttaacactattgataggtgatgtattttttatcacctcaccactactacatccagtaatagtagttacaacaaccatacaacttataaatatcgagaatatttttttcataaaaaccacctcctcgataaatatatcactcctatgttacataaaagttacacttcactttgaatttcgctgtctattaattgaagattatactgttgaattaattctattagacgagctgcatatatactattgccattttcatccttcgcagtactataacctgccttttctaatgctttagcttgatatatatacgtttttgcatcaaatacaccattgtttttataccttttatttgtggctaaaaattttgcatggtcttttatagattcatttttatcatcatatattctaaatttatcatctataattgtatctaaatgttctttcgtttctaaagtcactgacttacctttccaataagcgtcagcctttataccaaatagattgttatattgttttgccaaagttgacttgccccagctagattctattatagcttgtgcaatagttatagatggaagtattttataatccttataattttgtattgcttctgttttaatttcagcaataaacttcatatattttgtatcagacttcaatctttctggttttataccataatccttaagattgtctatataattatcaaccaatcttttttgtctattactaaattctaactcatccaaaatatcacttaacttatttattttattatttttagaaaaattcttaacaaataaatctgatacttcttgtatctgtgaatccttaacgttttttaagttatttttatttaacacagcaacaatggaagctacatacttccagttaacttgtgcattatttttacttgctaaatcagcatattttatatacttactgacatttatatcatccttttttatctctctagatgaatattccttcactaatacacctattaaaattgatattatcagtattataacaatgaattttttattcttcataaatattgtcctcccttatactatctgctgaatataatataccttacttttgtgacatattctttacgaaattttgaagattttatgaagatttatgaaatatatttaattaaaggcactactattgttataatatatagttttctatcacacaaaatagttaaaatagataaataattaaataaacttattttaactatttatataataaaaatattattaaatctacttatcaatttttatatatttttctaatatatattttttcccatatacaataatttttattggtttaccttttaaattttctattttaattaaatcactacatacatctacattaataatattatctctataatttatattgaaagaataatttttccactcttttggcaacttagggtcaaaagatagagtttcattccatgttctcatgcctgcaaatccatgtacaatggaaagccatgaaccagacattgaagttatgtgcagtccatcatttgtatcattattgtaattatctaaatcaagcctagctgttcttgagtataattcataagccttttctaggttatctatttctgaggcaataatagaataaatactagaagataaagaagattcatggacagtatatttttcatagaagtcaaaatttctctttttttcttctttagtaaatctatttccaaaatagtaaattccctgtaatacatctgcttgttttataaaacacgacctaagaatcttatcccaagaccaattttgattaagaggaaaattttcttttggtaaatcctttacttctacaaattctttatctaaaaaattatcattttgaattattatttgtagttcctcatcatacggcagatacattttatttgatattattttccaaaactcaacttcttccctagtcacattatttctgtcaatacattcattacactctttctctaatcgtaagatattttctacagcataatctaaacaccatttagctatacaattagtataccaattattattgatattgttttcatactcgtttggacctgttactccatgtatcatatacaaatctttttttgtagacaaatgaactctacttgcccaaaatctagctatttctattattacatctattcctttttcttttatatatttatagtcacctgtataatttgtatagttatatattgcatatactatacttccatttcggtggatttcctcaaatgttatctcccattcattatgacattctactccatcaaatgttaccattggatataaagcacctttaagccctagtttttttgcattatcctttgcctgttctaactgattgtacctatattctaaaagatttctagttacctccttatctgctacacctagatatactggaacacaaaatgcttctgtatcccaataagtagctcctccatacttttcaccagtaaatccttttggacctatatttaatcgcgaatcttctccataatatgttgaaaatagttggaataaattatatcttataccttgttggctacttttatctccatttatttttacatctgcactttcccatcttttattccataactttgtatgttcatttaatatatcatcataacttttagatagttctatatttaaaatgtcttcacattttcttaatagctcactttccttataatctctagttgaagttatagatacatatttttctatacttgcaaccttattttttaaaacatccattgttatcgaattttcacagtaattataatcactctcatgagatacagcttctacatcaccatttgtcttaatatacatcattgaacccacagtgaatactggtgtattaaatgcattctcctttgttcgagaaagaatactacctttatattctaaagaacttgaagaaattccattccaaaacttttcctcatagtttgaatcttcattttttatatttgaatctaaatatggtacaaattttattttagtattagaatttaatgattttatactatatttaattactgcaagttccttaacagatatacttaaaaacctagtaaccctaacttcaaattttttatcatttatatttacaataaacctacgatttaaaataccatttttcatatctaattctctataaaaatcttctactttacattttgctaaatctaattctacatcatctatgaaaattcttacacctatatagttgactgaattaggaattttaccaaagtattctggatacccatttttccaccaaccaacacgagttttatctggaaaccatactccagctatataagaccccttgtgtgtatctccactataattttcctcatagtttcctctcatacccatatatccattgcctatactcattatggactctgctaatctattttctttgatttcaatcttatcttgtataatcttccactcatctacattactaaataaacatttcatataattctcctaactatatactcattatacttttcttgtatatattcaaactttaattgatttgttgaatctacaactaaatttgctttttttaagttttcataatttccaacaccaacagaaaacatattagctgagtttatagcgtctatacctgcacttgcatcctctatccctatacaattttgtggatttacattaagccctttcgctgacataagaaatatctctggatgtggtttattgtttttacattttcctgcatcagctataaaatcaaatttgtcacttatacccaaatgatttaatacatttattgcattcttacttgcagaagatagacctatctttatattattagattttacatcaattaacaagctttctatgcctggcaaaatatcatttgaagttatctcatctatcaatgatacatagtaattatttttttcttcagccattctcactttttcttcttctgaaaatgaatatttcttatttccaaattctaatatcctgtccaatgactccattctacttatgccttttaaagattcattaaattttgtgtctatatctatcccaactttatgggctagttttctccaagccatatagtgataatatgcagtatctgtaattacaccatctaaatcaaatataaatgcttcaatcattcttatttcctctttctacaagaaatttttagactaataatcaatttattttctatcttgtatttaagatattatttataaaattatctactctaactcagtctttaatttaaaatctactttcaattcactcacttgtaaaccatatttttttatgttttataaagacttgtttaaactgtataataatttaacatgaaatctaaaataaatactttttgtattattttaaaataatgaacttgtatttctctaacattagttcttcttttaaatcaactatttcttcttcatataaatcttttacttttttatttgctaaataatctggtaacgtcaaaattatatttttagatgaattatttattattatagaaatagattcttttttcaatataatcgttccattttccttatctgctaacacccattcatttgatatagacctaagttctttattttctttacgaagtctaataatcttcttcataaaatcaaatatatccttattccatttttcttcattccattccatacattttctttgaccttcagatattgaacttaattctccttccattccgatttcatcaccatagtatatacaaggacatcctgtttgtacaaacataaacatatatgcaagtttaaatctatcaatatttccattagcataagtcaatattcttgtagtatcgtgacttccaagtaaattaaaaataacttcactaacttgtattggataacttaccattacatcatttatcatatacttaaattcttcggcgtttatctcatctgtacaaaagaattttttcatggcttctgacatcaagtaattcataactgaatcaaattggtcacccattagccatggtaaactaccatgccaaatttctcccaatatataaatgtctggttttacttttttgacttcttctctaaactttctccaaaaaacatggtctacttcatttgaaacatctaatctccacgcatctatatcaaattcctgtatccagtacttgcctacatccaataaatattttattacttctgaattttctgtattaagtttaggcatatatttttcacacccaaaggtttcataaggtatatttttttcatctatctgttctattggagtatcaattttactcatatcttttatataaaaccagtttttatatcgagaattttccttattttgaactacatcttgccactgtttagaataatatcctatatgattaaaaacagcatccaacattatttttatatttctcttatgcgcttcttctattagtttttttaaagtctctttatctcctaatgtagggtctacctccatataatctaccgtatcatatctatgattggtttttccaattgtaatagggcaaaagtaaattccgtttattcccaaatcactcaaataatctaagtgttctatcacaccttgtaaatctccacctgtaaaattatctctggttggaatagctccccatttatctactccttctgggtttatagacgggtcaccatttgcaaatctatctggaaatatctgataccaaacagtatctttcacccaatttggcactttaggtatatctatataatttaaatatggatatccaaaaaaattacctatttcacataattccttttcatcattttcatttcccaactctattattcttttttctgtaaataaaagtttttcttcttgaccttctattataaaaccatatcgtgagcgtttatttaaaggcttacacttagctatccaatagtcaaataattcagtttctacttctttactcattactatatttgttccaccagaccaaccaactccagatgcatttaaatttcctcctcctgcacctcctttatcccacacatattggtctcctattcgtaaaattactcttttcgcttcattttttttagttctaagtcttatatgtagtgtttctctatcataaccataggcataattgctcattggtatatgtaatatagcttcttttgttaaactattttgaattgttcctttgatttgattacttaaagttatattttctttatttttattaaacattttaaaatttccctcctttataataatttatataatctaaagataggttaatatattttactattatatcacaataaaaatatataatagtaaaatatatcaacaataaactattcaatttaaaataaactatactatttaaatttaattctatttagttattttagcaaaataaaaacctctagtatttttctagaggatacaatattataactattaactttttaactatccattaatttacttcaaaacatactctaagctatattgttagatttaactttttttatatttacaaaataagtttctctttctttaaataaagatacatatttaaagtcaagatacttaagcatatcataggccacatcaaaatctttacatatatcttctaccctatgagaatcagaacctacagtaactataaatcctccaagttctttatatctttttagaatatcttcatttggatgtatagcatttaatccatatctataaccagaagtatttagctctataccactcccattattgattattgactttaagacctcatcaataacatctttaaagtcattgtatataactctattatctgaatatattccatacctagatatataatccaaatgaccatatatattgtaatctccaaattcacgattagtttcaagtatgctattaaaatatttataatacgcatcttctttgctaagacctttaaaatacgcctttgatggaacaggtacattgtcaattgtatgagttgagcacaatacaaaatcaaaaggattagaatttattatttcttctatttcattttttagatgttttctgtaacctacttcaacacctagtaataactctatatcctttttatatttttctttaaacttattaaatactggaacatagtcattataatttatgcaaaatcctctatcttcatcatgttctaaatggtctgtaaaagtcaaatatctaacaccaatacttatagctttttttattgtatcttccatggaatcctttccatcacttgaaaaattagtatgaatatgattatctattaaattcatattatccctccctttattttatctatcttaattatacaacaagtttattgtatacatttgttaaaagaaaattataatggttaaattttatttacatacttttatttttacaaaaaagagaagcacctatttctgattttagaaaatcattaaggatacttctcttaatgttacttttatatacttcaatttaatttttaaaagtcttaattttgtaatagagtttagctgttatatgtccaatcatataaaaagctgtataaagtaaaacatatatatatgcagaatcatttaaaaatatatacattaatactatataagttactaaagacacaataagagataaaatccaattagtcttatttaatacacaaattatcccttgtattaaaaaagaaattggaaaaatcaaaaccattcccacaacaaaaatacttttagattgaatatctggaatattaaatatatctgtagcaaaagttaaaaacattagcaccattatgattgtaggaaatatgatactaaaaatattactctttttcataataatcaatccttatttattggatatttgataatcttcaattattttgttgcctcaatttctcccatcattcttactaaatcttgtccatattgacctccagcccaattattagataaactttcaactgttttagccttaccaaataaagatttttcatgtctagggtctactggatttgaaagtgggtaaccatcttgtcctgcatataagcataaatgttgaatttgagctaatattccttcttcccaagtatcaaatcttgaatgggcattcttatcagtatcagaaccacctacagaagttttaagtccacaaggattcttaaatgatgcatctaatactccaccaaaattacaaaaaccagtttcttttgcagattgagctactgccaaaacaggattaacaccttcctgaacagcagtatcatataatattggtattaactctataaataaatcattagcttttttagattttgcccattttaagcacgcttctaaactagctgttggctgacctaatatgcttgtctcatttttcataggtgactcaccttttgtagacgaatcgccattattttgtgcagcagaaacacacttattatacacactgtcacttattgaacctaatctagtaatcttatctgctcctgctaatatagacttatcactactttctgacaccaatacaattggattttccttagcaattgtagaacctgtaagtgcatttactaaatcatatccatcactcaaataaaattctgatgcatctggataaaactcttttataactttcttatttgtatcatatctatctgaaccaccaagtcttttagcattagttttattaactaaactagtgctcattgatatactcccacctactgcatatgtttttacattgcttgttgaaaaaggcacactctttccatctgtaagtactataggagctatatctcttactgatacgggtgcagcacttattgtatctgcttctcctttatatgcattagttaatatcacttcatcaacttttttgataccatttacctctttagcaacactataactagtctttattctgtcatctccacccaatctagttacctgtgcccctgtgttttttagttcagtttctactgacttacttattgataattctttacctattatgtatatctttttaacattttttaatctttgttttgtttcatttggtatcttatttttttgtgcaagcaaaattggagcatcaacagcacctgcaagaccacttgctgaaagaccatctgctatagaattatccatatttaccataattgctgtatcataactctttttatctgctattaatccagccgtctcatatatattgttacctttaattgtatctgatgttaatgcatctacattaggtacatttattagaaatatagctaatgttaaacctaatgctaaaactcttctaattgttctcatattcttcccccttgatatatcaagtttaattcaaaaatgactataacatagtattacatctacgctatagtcatttattataatttaataattatatatttgttattatatcataaattacaaaaagtttccataatattgtatagattaaaggaaaaatttacattttagttacaatttactagatttttgttctaatgtacctatatttagtaacaatttgtaataaaaatcgatatctatattacatatttaattcactgttttacaaaatgaaattttattgtatacaataaatagattatatgtttacataatctatattatttttaagtaaatcttttatcgatattattaagaatatatattacatcaagtttattacgtgcaaaccactatcaacttaaatacctaaggtaacacttgaagtagtagattcttggtaacaataattattgctatcattatctttttttaattaagtatttactatttatatatcaatctacttttcacttttaatttaattctaacatttttttatatgttttatgatatataatgtgatatattctaattaatgatattttcaagtaaaaaaatgttactctattataaggtgatagtatacttgaaaataaataaaacacttaactttatttaaggagatttatgatgagtaacaaacaaggttctaacatcaaagatgtaaaaattaaaaataagttaataatattgaaattactttctacaaatacacctatgtccagagttgatttagctaagtctacaggacttactaaaatgactttatcaaatctagttactgaacttattaatgaaaatatgattagggaaatagagtcatcaactttaaatgcacattcatcaggtcgtaaacctattttattagatatttctaatatatcgccttgtatttgtggaatcctaataagaagaaatatatgtaaggtaattatttcagatttaaaaggtaatattgtaaaacaactttctgaaacttaccctaaatgtctatcaaatgatgttttaaaagatataataaaaagaatgtttactaaaataatgaaaatcaacaagagagatataattggaattggtatttcttcaataggtccagtagatgatataaatggtaccatactaaatcccccagactttggaaatgtatcaaacctaaatatagtagattttataaaagaaatgtctgattttccaatatttttgataaatgatgctaattcgggtgcattagcagaaaaaatgtatggtttaggtaaaaatatatcaaattatatatacctacacataatgaatggtattggagctggtctagttctagaaaataaacttcatactggcaacctaggacaaagtggagaaataggacatacatcaattaattttagtggaccattgtgcagttgtggtaacaatggatgtttagattattatacaagtgtcagtaatctaattaaaagaattgaatcattgagccatatttatcctaactccccattaattaactgtaaagatttttctttagtcaagttaatagatgaggcaaataataaagatagtcttgccatgtttttgcttgatgaattttgtacatacgtatcatatgcattagttaatacacttacattgattgattgtagttctataataataggctatgactttaatatacctggtacatttatagaaaatacattattaaaaaaattgactgcttcagcaagtttttctaaatataaaaaaataagtgtaaggcattcaaattttggagcaaatgcaccattaattggctctatagccattgtaagttataatttttttaatggtagtataaatttttattaaatatgtaaaatatttaaacacttttattgaatatttttccatttaatattattatattttataagagcatttaaaatttggaggtataaaaatgatttcagctaaaatggaaaaattacttaatgagcagattaaccatgaattatattctgcgtatctttatctttctatgtcttcttaccttgaagcagaaggacttaaaggattttctaattggttttatgttcaatataaagaagagacagaccacgctatgtttttttacaaatacttacataatgtaggaggaaaggttcagcttgatgctatcccaatgccagattcagactttacttctgcaatggatattcttgagcgtacgttagctcatgaaaaaaaggttacagctttaataaacaacttagcagctgtagcaaactctgaatcagactttagaacttctcaattcttactttggtttatatctgaacaagcagaagaagaaacaaattgtgaagacaatataaaacgtgttaaacttgctggagagggtggtctattctttgttgaccaagaatttgctaatcgtacatatgcagctccaacaaacccacctgtgacaatataacgtttaaaaatttttaatataataaagaaggtgttttaatgaaaatcaagattgattcttatcattaaaacaccttttattattcgttttatacgtagtattttattgtttatacagtgctatttcacaattaaactcaaaactatactttcattttaaaatatttttaaattaaatttggggtgactgaaaatcacactatctaacttacaaaatgtgattttcagtcggtgctttaattatggttgaataccaaaacttataaactatttatatttaactattaaggcatctactgcacatacgccttttcctttaggatatacaaacactggatttaagtctatttccttgacttcatccttattttcataagcatattttcctaatttgaccatcatatctgcaagagcatcaatatcacaaggctcacttcctctatagccatttaaaagcttaaatgattttagttttttaagcatcataatagcttcatcatgatttataggtaatggatataatgtagtatctttaaatacctctacaaatactcctcctaaaccgactaataacattggtccaaattggtcatcattagttataccaataataatttctataccactttctaccatttcttgaactaatataccatcaatattagcatctggttttgctttttttacattagttaaaatctcattatatgcatctactgcctcatctctattcttaattcctattttaactcctccaacatcagatttgtgcaatatttcagaagaatttatttttaaaacaacaggatacttaatatattttaagatttcatctaattcatcaatactttttgtattaccttgtcctggaactggtactccatattttttcatctcaatcttactatctaattctgataatgctactacattatttgactctcttttcttaacagctttaaattctaaagttctttttgaataatcataatctataaacttagccattttattaaaacaagtaaatgtagttccaactgatgacattataggcacttgattatcttctaatctagtcctataatctaaatatctatttccttcaagtgtaggaactgcaaacacaggttttttcaatccttgttctctagcttcacttacagctttacaaagggtttcatgcatttcattttcttcatctcttatatttgcacctaccatagtaaatccaacactatcatccttttcaaaggtatgtaataaacctactatcatatccttttcatggaataatgctgttgtagcatctagtggatttttaggtgttgcaaatcctggaagatattttttcatttcttctttagtttcagaagatatttctgcaagttctacaccattttcttctgctaaatctgcacaaatagtattttctcctcctgagaagtttattgctgcaaaattagaatttgcaggtaaattaccatctaaaacactaaaagcttgtgctaaacacataaactgttctaaattttccacagaaattactccatatttttcaaaaatactttcaaaagctttactcgaaccagctaaatttcctgtatgagaggcagcagaaatagcacctttttctgaccttcctgatttcaatattattactggctttcttttttgtgctgccctttttaaagcatctataaatttttgaggattttttaaaccttcaaggtaaattgctattactgatgcataatcatcatctacaaggaaatctactgcatcttctagtgtaactatatttccatttcctgttgaaaaaccataagatatattaaaataatcacttgaaacaatttcagcagttataaatccactttgacctacaattcctataccaggttttttagtatctaaagcccatttagaacctcctgcccatagattaaccttatctatacaatttagcaaccccatgcagtttggacccaatattttcatatcgtatgtatttgatatttctataagttgattttctaaatctgtaccttcctctgtaccttcctctgcaaatccactagcatataccactgctgcctttgttcctaactctccagaatcttttaatacagatggaactacatttctaggcgtacatactactacacagtctactacttctggaacttcttgtatcatcttataacattttctcccaaacaattcttctcttttgggattaacataatatactctatctgtttccttactttttactatactaagtgctgcacttcttccaaaaccaagtttatcagtcactcctactatagcaatactttttggtctaataagtttttccaaactcataaattcacgctcctatatgtttatagttgtgattttaagtgaattttatctcaagatgaagtttctcttggcactaaagattattaaatcttgagataaatcacttaagataagggtaatttatcaaatggcgttattatagccttccatgaatgctgcttcattttgaacattaaactttccttttcctttttcctcaaagaaatcacacatagtttttaaagctaattctttttcaagtaacccagttttagcaattaatgctccaagtactactatatttgctgcttttggattgtttactttttgagctaattcctgacaatttattttaactacacttatatcttctcttaatgttacattctcatctattgcagatgtattaataactactgttccaccttctttaactaaatttatataatctaaagatggtttattcattgctactaaaacatctatttcttccatatcaggcccacctatactctcatcagaaaactttactacactataggcttttccacctctcatagttggaccatatgcaggcatccaagttacttgtttccccaattcaagtgctgactcagctacaatcagaccaagagttaaaactccttgaccaccaaaccctgcaaatactagctctttttccataactattcaccatccctttgcttaaattcgccaagagcataatatggcactatttcttcttccatccatttgatagatttctctagtgatacaccccagttagttgggcaaggtgctaatatttcaactaaggaatatccctctccatttaattgagcttctattgcattttttatatatttttttagattaattatttcctttgggctatgaactgaacctcttgctacatatgctacatcaaagaagtttgccaccatctcaggaactttcagtggactaccagtagtctttatatctcttccatttacacttgttgttgtgacttgacccggcatagtggtccatgacatttgtccaccagtcattgcaaaattattattgtttattacaaatacagtcacattatgatttctatatgctgtatttaaagtttcagaaagacctataacataagcatctccatcaccttggtaagtcattactaatgtatctggaagtgctactttaactcctatagctgtagatgaagctctaccatgtgcagtttgcatcttatcaccattccagctaaaattcatattgcagacacaaccaactcctaatgttaatacatgatttttttcatatccatgttcttctattacctctgctattatacgatttactattccatgaccacaacctgggcaaaacttgtttggtattgaaacaacgctaggtgttaatttttctgtagccatattagaacacctccttgatttcgccagattttattttgctataagtgtccattacttgcaatgtttttggtatatgatttccactaaataaaccatacacaggtacattttctttacatactttctttgaggctaaagcaacatcttctactaattgacctgtgtctgttgattctactgagataaatccttttacatctttacttaccttttcaaatgctttatatgggaaaggccatactgttattggtcttattattccaactttttcaccttgttctctaagtcttctaacagcattcatagttgttcttgatggtataccgaacgctacaaacacatattctgcatcttctacttgataatcttcccattgttgttcattttcagttattctcatacgtttctccatacaaaaagttggcttttggttatctgcaacctttgcatggtctctattacttccatcataagtccaacctaaatctccttctctcttcttaaattctggaaattctactggttccatcatttgacctaaagctgcttctgtcaaaatttcgacaggcactctgtatttttccgctacatcaaatgagttatacatcaaatctacagtctcttgaatactgtttggtgcataaactatcaaatgataatctccatttcctccccctctagtatctcttagatagtctgtctgtgctgagtccaatgagccaagaccaggcccccatctctgtacatttacgattacacaagggtaatgatttgcacataagtaagaaatcccttcttgttttaaagatattcctggtcctgaagaactcgtcatagacctcattccacttgcatatgctccatataccatatatatagcagccatctcattttcggactgtataaaagttcttccaagttcagacattctatgtgataaaaattccattacctctgtttgtggtgtaattggatatcctgcataaaattcacaacctcctcttagggctgcttctgcaatggcgtggttccccttccacatctttttcatattatcccaactccttctaagcctcttgacatgctttttctttaattatttcaaaaacattatctggacacacctgatagcaaattccacaaagtatgcatttactctcatcaacttctacatgagcataaccttctttatttatcttacttgatatttttaatgctccttttttacaagatataacgcagtattcacaacttttacatctctctgcgtttatttttaagttcatatctacaccccgtttcataatatttctatctattatccaatacttggctctcctttaatatttaatatttcctttaaaactgctacaaatttcttattttcttccatagttccaatacttacacgtgcatgtgtagcacttggtcttattacaaaccctctttttttcaagtcttcaaataacttaggtatatctgttttcatatctacataaaggaaatttgattgtgaatctacaacatcaaaccccatttttgtaaactcttctttaaagtaagtcattccaactctatttaattcatatgtttcttttataaactcttcatcatcaagtgctgctgttgctccacttatagcaacacgatttgcagagaaaggctcttttactgtaaataaagttcttattatctcatctttagcaataccatatcctactctaagccctgcaagaccatatattttagagaaagttcttgttactataacgttataattttcccttacatacttaagtccatccacataattaggaactgttaaaaattctatatatgcttcatccaatatagttataatattttcagggactttctttaaaaattcttctaactctttatcatccacaattgttcctgttggattattagggttacatacacatattaattttgttttatctgtaatcttatctaatataccttgtaaatcatacttataatcttctgttaaaggcacttctactggtatcccttcattttttatagttgcagttctatatgatggaaatgttgggttacaatatataacttcatctcctctatttataaaagcctcacctattagagtgataacgttatccgcaccattagcaacaataaaattttctggttttaaatctagcttttcagctaattttcttctaagttcgttagcttctggctctggataaagttgaccttgttttagcatttcaatcatagcttctattgcttttggtgatggtcctagaggattttcatttgaagctaattttattatttcttttacaccatatttttccttaactttttctattggttcacctggaacatattgatgtaattcttttacggtatttctcaataatttttctatcatttttaaaagccccctctgtatatgtattttgatttatataaacgctattgcgtctacttactttaatagcttaaattaaccatctacttaactttcttttaactaagcatttctttgatttaactcttctcttatttggtttaatttcttgtcacttactggatatagtattgctataacaacagctattattaaaggtattgccatagaataagaaatcatatttataaaacctgatttaactgcttctgtgactaccatatcagcttgatatcccattgagttcattaaaactgttcttatagtagttgcaagtaatactcctacttgtattgcaactggatatagtgacatacttaagccaggtaagtcttttcctgatttccaatgcccataatcacaagaaccggcaaagaaattaagatttattattgatactacatttgaaaaacctccaccaattgccagcaacatagttactcctaaagtagttttcccccaaggagtccatgcaaccaataagtggcatagtgcacatatagaaaaagaaattattgaagctagtttttgctctctacagatttttataaacactggtgcgaaaaacatgaatgctacacttaccaaaggcatgattgataaaaatactgctaatccacgttcatcttctattacatatttaaaataatatggagccaaaggtcctaatcctatagatcttatacatataagaaattctaaacaaaatgccatcataagtggtacattagtgaatagagcttttgccatttcacttgctttaatctttggcttctcttctttttgaagaacttcttcttctgctccagattttattatctctgttgaagaaaaccaaaatactaaaaggcatcctgctgcaaagaataagtaggtacctaaataacccattccttctccacctaatacatctgcaaataaaactaataataacggatatgaaaaacctactaagaatttaccaacttctttaaatatattagtagtagttgagcctataactcggtctctaggtgtcttagcaactacagggtaaatagcataaattatagtgaaaactacttgctgagcacaagatgctattaataataaagctgtcatcaaaggtaaaagtaatgctggacttattttcattaatggaactatgaaaaatattccatatgttaatgctaacgctgctggtgcatatctaagccatggataatactttccttttttgaatggttgtttgtcaaatactgtacctgttataggagctacagcaatttttatgaaagattgtataatttgcataccacctgccataattacaccaagttttgccacatcagttaaaaaaatatttgtaacagttgatacaaagtaacctataaaattgtacgctaagtttatagaacttgaatatgtgtatattgctcttttcttagggtctctcatatcatctctaaaatttgatataagatttccttttggtttgctttcttgactactcacatctacccctcccttataaaattttcttacttttcattattcacgtataataatatatattttgaatcttaaatatctcattcttgattcaggagtatatttttatatgtgtataattttaatttaattatattcttaaaattcataattgtcaaacactttttaagttttattttttactactaaaattaactaaaaagctatttaggcttaatttagatttgttttttattattttcttgtcttgaaatgtcattgaaatgcgtattttaaattattttatcatatttctagtgattttaaatttttataattttattcaagaataatttattcaagatatttctatactacatccagatattaaaaatatctttttcttatttagattccttttatttttatacatgtactattgatttaaaaataaaagcgtgttacaattacaaaaaagaatctatgagataaatatcaatatgcaaaaatttcagaattttcaattttctatttttacgtaatttccatctaatatcataaattattatagctatattaatctaaaaccaataaaacaaatatcgtactacttttatataaaatatattttaaatatattttatatattttattaaaatattttataaaggagaaaagactatgttacttttaattgttacgtgtgcaatatacatatggattggtttttatttttcaaaaaaagttaaaacagcatccgatttcctaatcgcaggtagaaatcttcctttgcctatactagctgcaaccattgctgctacatcttttggaggagggtgcttagttggtggagttcaatggggagctgaaagaggactttgggttggaatgtattctactataggtgcagctttagcttgctttataaatgcctttttcgcaggaaaattaagaagcttatcttgtgatataacacctgctgattatattgaaactagatatggtcatagtgtatttttaagagcttatcaaagtcttgtaacaccaatatctatactagctattatgggtagtcaattaatttcttttggttctgtatctactgcatttggtattccttatgatatagctgtaattataggagttatagttataattatatatacttatacatcaggaatgtggggagttgcagtatcagcatttattcaacttgctatttgtatagtgtttttgccaatagtagcttatataagcttaaaattagttggcgacaaccctttacttatgttacaatcaatggtaaaagaaccattctttccaggaaataaatcgattagtgattttatgtatacagttttaccattagttttaggctcaatattttcttatgaaagttttttaagatatcaatgtgctgataatgctaaaaatgcagttaaaagtagtgtaattgcaggatttatactattatttcttgccttccctataggaataattggagctattggtggtagtttatttccaaacatatcatctgttcaggttttacctcaaatgatatcgactactttgccacctttaatatctgtattattcttagctgctatattggctgccataatgtctactgccgattcattaatgacctcaatgagtgctattatatcaagagatatttataacaaattattacatcctaatatagaatttaatgatttaaaaaatactctaaagtattctcaaattgcatcagctttgacagctataataggtgcaatcatagcacttaaatttgatagtttattagaattattgttttggccggctccattatgtacaggtgtaatatttgcaccatttgtaattggtctttgctggaaaggcgctacaaaaaaaggagctatctatgctgttatagtaagtgttatattggcattattaaatatgattggtattcttactgtatttgacagaattttggttcctataataggtggttctattacaatatttatagttagcaaattttcaaaaaaagattgaaaagagaggtatacacagtaaatatgtcaaaatcagaaaagggcaaagaaacaaaagctagtattataagtgctgctagagaattattttttgagcaaggttatcataagacaacaactaggcaaattgcagaaagagctaatataaatttaggtctaataagctattacttctcaagtaaaagcgaaataggagctataatatatgaagatataagaaatgaaatgcagtctttaatctataactaccatgaagaaggtactatgatgatgttctttcttgctatgaatgctgacctttgtttccttctaaaaaacgaagcatatagaaatttttatttggatatagcttatgaagaagctattttaagctatcaaagaagtgtaaccgaaatggtcatgaaaagatatgttaatgataaagaatctatagaacatgatgaattaatactttcttgtattggtatacttgctatgaaacctgaaataattagagtttatacttcacacaagtacgatatatcttctcaagctgtaataaagcattttacaaaacagtttcttattaatcttggtcatagtacggatttatgcgaagagattttagaggaattgagtaaatactatatagatatagttgacaattttactccaataataactcgtgtaagaacttaataaaattttattaaattcttatagactgaaattttaaaatcataatttgattttaggatttcagtctttatcatatttaaagatattttatagtatacctgttaataccataagtgtactacccaattatatctataaatttctttatccataaattccaaagacgccattcatgcccccctacacactcttcatattcaacatctacacccagagactctgcatattttttaaacatctgattatttttatataaaaaatctctatcaccacaaaattgataaattttaggaatatcttcatttctttctttaaggttcttaagtatgtaaagtaaatcattctcactatttctagcgtcttctggtctaccaaaatcgtgaaataaaatgtctgcattggtttctatttgttgattttctaactcatgaatcatatcaggcgaaccagaaaaacttgcaactgccgaaaactcttttggttttgaaagtgctaattttaaagctccatatccccccatagacataccagctacaaagttatcttcccttttatctgataaaggaaatatagctctaacaaatttaggtaattcctcgcttacaaaagtaaaatattggtgtccatacgccatatctgtataaaaactagtttctactcttggtattactagggctatatttttatttttagcataatgctctacattagtatatctaatccatgagctttggtcatcttctaaaccatgaaataagtataatgttttaaatttaccttcaaaatcatatatctctttaccactaaaaagttcttttccatttgctacaggcaaaattacaattatatcagtttctcctccagtatatttagatttaaatttacattctataaatgccacaaaaaacacctcttctataataattttatatctaaaaagcaccaagagtttaactttctcagtgctttaaatattgcttaatttatatatttttaattatacataatattttttagctacatgtaatcggaagtatctgtcggtaatccctttttgtccaatttactttcaacaatatccttaattatagaataaattactgcaaacattggaactcctataaccattccaataaaacctaataattttcctgcaaccaataaggagaacaaaatccaaaatgcagatataccaattgaatctccaagtattttaggtcctataatatttccatctatctgttgtattattaatataatcaacaataaccagaaagcttttataggagatacaaacatcactattagagtagatggtatagctccaaataaaggtccaaagaaaggtataatatttgtaataccaattataactgatattaataatgtatatggcattttaactaatgtaagtattacaaatgttagaatacctataatgaatgaatctaatattttgccacctaaaaatcttccaaatgtatagttacttctatgagttaattctaaaattctggcagcttgtttttctgtaaatactgcataagttatttttttgcttaatccatagaatttttctttatcaattaataagtatactgaaacaattaatcctagtacaatattccatatactagaggctacattctttaacatacttcctaatattgggattaaatctgttacaaactttataatatatgtaacaaactcattccacttatcaactgccaaattaaagtattgctcatcaagatttaaatcagtcattaatttatcaataagcttagttgcattgtttacatacataggtatatcatttgctagtccaacaatactctcaattacttgtggcaatacgaaatgcataaataagtaaagtatcaatgtagctgttgcatatgttaataaaagacccaagcctctttttgaactttgttttagtttttttaatttctcactttttataaaaattctgtcttcataaaactttaaaataaaattaagaagatatgcaatagcaaatcctattataaaaggttgtaatgttgtaaatatagcatctaaattattagaaaatacatcaatttgtgatgatactagataaaatataatactactagcagctattataaatgtataaattgctattgttgtgtattttgtattccaattaattttcattttttcctccttatttctatataattaaattttatcacaaaatcaccacttttataacaaatataccaaattaaaaataaaatatattcagaatacaaatactcaattttatttatatttattattctacaatataacctacattatctttttaagaaccttaattaatttattatcgtatggagcatatctaatagggacatccaaatttaatttttttaacacactcttatagtgagtaaatgtatcgaatccagcttttccatgatatgagcccataccactttcaccaataccaccaaaaggtaagtaattcgtagctatatgagtaactgtatcattgatacaacatccgcctgctggaatcatttctaaaagtttattttctaggtacttattttttgtaaaaatataaagtgccaatggatttggcatttgtataattttttgtattacttcatctaaatctttatatgttaaaatgggaaatataggcccaaatatttcttccttcattatattatcatcccaattaacattgtctactatagttggctctatctttaatgtctccttattataatttccaccatagactatcttatctttatcaataagagataatatccgattaaaatgtctctgatttatgattttaggaaattgctcattattacatggattatctccaaaatacttattagtataatattttattttctctattaactcattttttctatcttcatgcactaaaacataatctggagccacgcaggtttgtcctgcatttattagttttccccaagtaagtcttttggcagtaaggtctatattagcatcttttaaaatgatacaaggactttttcctccaagttctaaagtaataggagttaaatgctctgatgctgatttcatgattattttaccaacattagtacttcctgtaaaaaatatataatcaaatctttccaatagtaacttttcactttcttcttgacttccttgaacaactgcaacatattcttttgaaaaagtattttcaactatgtctttaactacactagatgttgacacagaatattcagaaggttttaatataacacaattccctgctgctaatgaccaaactaatggtataagtgctaattgaaagggataattccaaggtgacattatgagagtaacaccataaggttgtggaacaactttggatatagatggaaaattaaccatacttgatttaactctttttattttgctccattttcttatattctttatagcaaagtttaattcactataaaacatgcctacctctgtcataaaaccttcaaaattcgatttatttaaatctttctttagtgctaaaagtattttttcttcattttgtgatacaactaacttaagtttcttcaactgttctatacgaaacgatatatctcttgttttacctgtattataatattttctttgcattttaactaactcttttatatccattgttaaaaatcctttctttaagaattatattaatacatttttagaaaaagatttaaatttatcctaacattattttttatatcataataaattcatctcaatataacataaatcttccaataaaaaaagccccttattaagtataagtaagcttataaaataatttattttaaaataaacattttttaaaattataaccttattgaaacaattaaattatccatctttaataatattattttataaataatgtctagtaagtttctatgaaatctaactttagataataaataattataaatatatacctcttaaagttttcttatataattaagtattggagttaaattttctttattacaccaatcaaaggcttctccagacaataaaggtgcttctgctggtttaagaccttgacgttcttttttagctatagattttttaaaaaaactacaaagagtataatctataaaagacatttttgtctcatcccatgccccacgacaataaaagcaaggaactttgtttaattcatccttaaagtttacttctcttaatttctttattacttcatcatcatatggagcagctcctacgccaaatactactaaattttttttctgcaaatctttataatttttttttaagaaagaaattcccgctatattacaagcataaagacctcctcctaaaataatcgtatcatacttcataaccttttctatattaatattcttagtttcaaaaatatcacaagacaataattctgaaagccatttagcatatttttttgttgaaccatacttactcttataaatcactactacacttttcatataaattacccccctctctgatgtcatacaaagttgatttgatacttgcttattctccaacgtcattattttctacataatttttcacattttcaattcctatacttaatttcataattccaaaaaataactgttccacttctttctctgtaaaatcttcaaataaaagctgtaatactttttcctgcatacctcttacttttttagaatactcttgcactctatcttttgtcacaagacagatagctcttgaatctttttcattttgctcaatttgtataaaacctttcttttctaaagcaatagctagtttttttacattttgtcttgagcaccccattaattctccaagtttggttaatgtaagagtttcatctacagagtccgcaatagctaaaagtaaccattgtttcattgttaattctgggtctaatttatcacatgtagtttgaagtttattttgcattacaaatatacttgcaaatatagcttgttttctactatcatcatctaccatatattttttcattaaactttctgcatccattattatacacttctctttatcttagattttaattttttgataattttaaatagtaactagttactttatattatagtaattagttactattgtgtcaataaatttatttttattataaatggcaaaacggcatagcattatggctataccgtttcataaaatcatatttacaatcaatttataataaattataaattaaatatattttaggctataataagtttttcaaaatttactctaaagcatactttttatacttattatattctatattgctacattctacatctaaaatagctccatcttctctgtattctgtatttataatgctcgtattttcgttaaaataagaaactacatgacctttatcatatggaattaagaacttacatcttacacaatctttaaatatgctatcacaaatacattttatcattttatctatatttatatcttttttaactgaaacaaatataccttctttatcgatactatctaaaattctatccaatacttctacatctattaaatcaattttattatacacatgtatcataggtataccatctgcacctatttgttttaaagtatcttctgtcactttaatatgacttttatagcttggatttgaaatatcaataacatgtaacagtacgtctgcctcacatgcttcttctaatgttgacctaaatgcttttactaagtcatgtggtagattacttacaaaaccaacagtatcagataataaaaattctttgttatttgcaagaactatatttctgacagaagtttcaagtgtagcaaataacatgtttttctcaaacactttcttttcttcagagtttttaaatatatctactagtttattcattattgaagatttaccagcatttgtatacccgactagagctacatttggaagatttgattttcttctcatacttctttgagtttctctttggaattttaaatcatacaactccctatttaaagatgttatcttttcttctattcttctacggtcaagttctaattttttctcaccagaacctctatttttagtaccaactccaccactttgacgtcctaaattttcatttgaacctataagtcttggtaacatatattttaaacttgctacttctacttgaagtttagcttctctagtttttgccctttgtgcaaatatatcaagtatcaatgccgttctatctataatttcacaattaagcttttcttcaagattttttagttgtgatgtagaaagttcattgtaaaatataactatctctatgttttctttctttattaagtttaatatttcctcaactttacctgtcccaatgtaaaatgctctattaacctgctttgcattttgagttatactccctacaacatcaatatcacatgctgaacataagttttcaagttcaatcattagttcattaaagtcctcagatttattatttatgtttaatcctactgttattccttttttcgtcatatccatattctccttatctgctattttttatttaatctatagcacgagattatggctctataattaaattcatcaagaattttgctttttatcttatccttaaatgacacttcttatttactattataataaccataatcgtgcattattttctcaatcttatataaaaaatcactttcttacacctcctcccaaatatattatgcagttttttcaataaaaaaactccttacaaatctaagtaatacaaaacaagctacttatatcataagaaggattaaaattctaaatatatattaaaaatacattagtttaattaacttatatgtaattatcattttatatttaaccctattcttaaatttaagtagttatttgcatgattaataaaagtaataaaaacatatacttcaatataatcatcaactattaaaattaaattctatttataataaaatttaaagaataaaattaaatatacattttgataatcacctccaacattttccttactacatattataataaaataaacactttgtaaagacataaaattatgtggctatctcaaaatatagataatcctctttttcattgttaaaatgataaaaatacactttatttcatacacaaaagagtgccttatgaattaaaaagttcattttaaggcaccctcatttattttatcttattaattacatgtctatgctaagatagttttttgttacattgcttcatcttcttcaaattgagaattgtaaagattggcatagaatccgcctttctttagaagttcctcatgatttccttgttcaactatatctccttcattcattacaagaatcatatcagcatcacgtatagttgataatctgtgggctataacaaaacttgttctaccttccataagattatccatagctttttgaatcaatacttctgttctagtatcgacagaacttgtagcttcatctaatattaaaattttaggatcagctaaaatagcacgagctatagtcaataattgtttttgaccttgagaaacattacttgcttcttcatttaatttcatcttatatccatctggtaacgtcttaataaatctatgaacatgtgcagatttagcagcctctataacttcttcatctgtagcattcaacttaccatatcttatattttccataattgaaccactaaataaccatgtatcttgaagaaccataccaaacatttctctaagctcactacgattaaaatctttaatattatgaccatcaatcagtattgaaccgctattaacatcataaaatctcattaacagtttaactattgtagttttacctgctcctgtaggtccaacaatagcaactttttgaccaggtttaacatttactgagaaatcatttattatagtcttgtttgggttatatccaaagttgacattttcaaaatcaattttaccttctaaaccatctattgaaactgcattttcaacaatttggacttcttcttcctcttctaaaaactcaaatactctttcagaagctgctgctgttgattgcaataaattggcaacctgtgcaatctgagtcattggctgtgtaaagtttcttacatattgtataaatgactgtatgtcaccaacctcaattgttttcttaattgcaagccaacctcctaagattgataccattacatatcccaagtttccaataaacatcataagtggttgcattatacctgataaaaattgagatttccacgctgaattatacaggctatcatttagtttatcaaactcttcaattacttcatcttcacgattaaatgctttcactattgtttggccactataagtttcctcaacttgaccatttacatttcctaaatattcttgttgatatctaaagtatttttgtgatttctttattattcttgaaattacaaacattgatattggtaatattaaaactgccactaatgtcataattccacttatagataacatcattatcaaaacacctatcatagttgttactgatgttataagctgtgtcatactttgatttaaactttgatttaaagtatctatatcattcgtaattctcgataatatttcaccatgcgtcttagtatcaaaatacttcattggtaatctatccaattttgctgaaatctcttttcttaaattataggatactttttgagaaattccactcattataaatccttgtataaaagagaacagtgcacttatcaaataaaggaaaagtaaaaaggttaagatttttccaattgcattaaaatctatacctacgtttcctccagaaactttactcactaacccttcaaatatctttgtagttgcctttcctaaaatttttggacctactatagaaaacgatgcactaccaatagcaaatacaattactaaaattattgatattttaaatttagataaatatgcaattagttttcgcatagtccctttaaagtcatttgctttttgtcctgcttccatagattttcccataggacctcttcccattctactcattagctagctcctcctttgaaagttgtgataaagctatttgctcataaacttcgcaattttttagaagctctttatgtgttcctattccaactatttctc
